(19) United States
(12) Patent Application Publication
(10) Pub. No.: US 2024/0043871 A1
(43) Pub. Date: Feb. 8, 2024

(54) NOVEL ADENOVIRAL VECTOR NOT INCLUDING REPLICATION COMPETENT ADENOVIRUS, AND USE THEREOF

(71) Applicant: CELLID CO., LTD., Seoul (KR)

(72) Inventors: Chang-Yuil Kang, Seoul (KR); Bongju Park, Seoul (KR); Kwang-soo Shin, Seoul (KR); Tae-Gwon Oh, Seoul (KR)

(73) Assignee: CELLID CO., LTD., Seoul (KR)

(21) Appl. No.: 18/268,890

(22) PCT Filed: Jan. 20, 2022
(86) PCT No.: PCT/KR2022/001046

§ 371 Date: Jun. 21, 2023

(30) Foreign Application Priority Data
Jan. 21, 2021 (KR) 10-2021-0008666

(51) Int. Cl. C12N 15/86; C07K 14/165

(52) U.S. Cl. CPC C12N 15/86; C07K 14/165; A61K 2039/5256

(57) ABSTRACT

The present invention relates to a novel adenoviral vector not including a replication competent adenovirus. A recombinant E1/E3/E4-deleted adenoviral vector, of the present invention, in which an antigenic protein and an E4orf6 gene are inserted in an E1 gene-deleted region, has adenovirus productivity, degree of antigen expression, neutralizing antibody production amount, and T cell induction ability that are similar to those of a control group, and thus can be effectively used as a carrier for various vaccines for diseases or anti-cancer vaccines.

### BACKGROUND OF THE INVENTION

### 1. Field of the Invention

[0001] The present invention relates to a novel adenoviral vector not including a replication competent adenovirus, and a use thereof.

### 2. Description of the Related Art

[0002] Due to the ability of adenoviruses to achieve highly effective gene delivery and large transgene doses in a variety of target tissues, recombinant adenoviruses have been widely used in gene therapy and vaccine applications.

[0003] Adenoviral vectors are theoretically impossible to replicate due to the deletion of the E1 gene, which is essential for replication. However, replication competent adenovirus (RCA) can be created when the E1 gene derived from adenovirus of HEK293 cell line is inserted into the non-replicable adenoviral vector gene through homologous recombination during the production process of the non-replicable adenoviral vector. The presence of RCA in adenoviral vectors leads to a number of safety-related problems, including adenovirus infection, unintended replication of the vector, and worsening inflammatory responses in patients. Regulatory agencies such as KFDA and FDA define RCA-related standards as less than 1 RCA among 3×10¹⁰ virus particles, and these RCA-related regulations act as an obstacle to mass production of adenoviral vectors.

[0004] Methods to overcome the occurrence of RCA largely include the development and manipulation of cell lines for adenovirus proliferation and the manipulation of the adenoviral vector backbone. Specifically, the following strategies are known: 1) a strategy for developing a new cell line introducing only the protein coding portion of the E1 gene region that has no homologous sequence with an adenoviral vector (1^{st} generation adenoviral vector), 2) a strategy to remove the adenovirus genes essential for replication such as E2A, E2B and E4 from the vector and to supplement the protein coding region of the removed gene by introducing it into the cell line (2^{nd} generation adenoviral vector), 3) a strategy to block homologous recombination by removing homologous sequences in HEK293 cell line, 4) a strategy to use other species of adenovirus with less homologous sequences, and 5) a strategy to maintain a non-replicable adenovirus even if it reacquires the E1 gene through homologous recombination.

[0005] Two cell lines (1^{st} generation adenoviral vectors) with E1 genes without homologous sequences have been successfully developed and being used commercially. These are the PER.C6 cell line, in which the E1 gene (459-3510 nt) is introduced into human embryonic retinoblasts (HER) cell line, and the N52.E6 (CAP-GT) cell line, in which the E1 gene (505-3522 nt) is introduced into primary human amniocytes. However, it is difficult to expect complete resolution of RCA occurrence in the process of multi-passage and mass production with these cell lines. The strategy of supplementing essential genes for replication, such as E2A, E2B and E4, in cell lines (2^{nd} generation adenoviral vector) was heavily studied and developed during 1995-2000, but failed to be commercialized due to low productivity compared to the 1^{st} generation adenoviral vectors and unstable expression of the introduced genes. Gene manipulation in HEK293 cell line is difficult due to the complexity of the genome of the 293 cell line and the number of copies of the introduced E1 gene (7 copies), and the use of other species of adenovirus may pose a safety risk to the administrator. Lastly, an adenoviral vector manipulation strategy that prevents the appearance of RCA by limiting the size of the adenovirus genome even if homologous recombination occurs by placing antigen genes in the E3 region is currently only being conducted at the research level.

[0006] Accordingly, the present inventors have completed this invention by developing a novel adenoviral vector that has adenovirus productivity and degree of antigen expression similar to those of the existing adenoviral vector without including a replication competent adenovirus even if homologous recombination occurs by deleting the E4 gene essential for adenovirus replication and relocating it to the site of the E1 gene deletion.

### SUMMARY OF THE INVENTION

[0007] It is an object of the present invention to provide a novel adenoviral vector not including a replication competent adenovirus, and a use thereof.

[0008] To achieve the above object, the present invention provides a recombinant adenoviral vector characterized by the insertion of the E4 gene into the deletion site of the E1 gene in the adenovirus in which the E1, E3 and E4 genes have been deleted.

[0009] In addition, the present invention provides a vaccine for preventing coronavirus infection, in which a sequence encoding a coronavirus spike protein is inserted into the vector.

### Advantageous Effect

[0010] The present invention relates to a novel adenoviral vector not including a replication competent adenovirus. A recombinant E1/E3/E4-deleted adenoviral vector, of the present invention, in which an antigenic protein and an E4orf6 gene are inserted in an E1 gene-deleted region, has adenovirus productivity, degree of antigen expression, neutralizing antibody production amount, and T cell induction ability that are similar to those of a control group, and thus can be effectively used as a carrier for various vaccines for diseases or anti-cancer vaccines.

### BRIEF DESCRIPTION OF THE DRAWINGS

[0011] FIG. 1 is a schematic diagram showing the mechanism of replication competent adenovirus generation.

[0012] FIG. 2 is a schematic diagram showing the novel adenoviral vector not including a replication competent adenovirus of the present invention.

[0013] FIG. 3 is a schematic diagram showing the vector with pRCA and 14 bp (pRCA-E4dl355) or 1429 bp (pRCA-E4dlO4-7) of E4orf6 removed in which a kanamycin resistance gene and a pBR322 origin gene sequence were introduced into a replication competent adenovirus clone in which the E1 gene was acquired by homologous recombination at the E1 deletion site of Ad5/35 in which E1 and E3 of Ad5 were deleted and the knob gene of Ad35 was inserted at the E3 deletion site.

[0014] FIG. 4 is a diagram confirming that adenovirus productivity was maintained because no cell lesion effect was observed in the pRCA-E4dl355 in which part of the E4 gene was deleted and the pRCA-E4dlO4-7 vector in which all of the E4orf4, E4orf6 and E4orf6/7 genes were deleted.

[0015] FIG. 5 is a diagram confirming that the adenovirus gene replication did not occur in the pRCA-E4dl355 in which part of the E4 gene was deleted and the pRCA-E4dlO4-7 vector in which all of the E4orf4, E4orf6 and E4orf6/7 genes were deleted.

[0016] FIG. 6 is a schematic diagram showing the pAdk35-E4dl355 and pAdk35-E4dlO4-7 vectors in which the E1 gene was deleted and a SwaI restriction enzyme target sequence was inserted therein.

[0017] FIG. 7 is a schematic diagram showing the 12 kinds of adenoviral vectors expressing a spike protein antigen and having the E4orf6 gene rearranged at the E1 deletion site.

[0018] FIG. 8 is a schematic diagram showing the construction process of an adenoviral vector expressing a spike protein antigen and having the E4orf6 gene rearranged at the E1 deletion site.

[0019] FIG. 9 is a schematic diagram showing the 11 kinds of E4-relocated vectors (E4re#13 to 24) in which the promoter of the relocated E4orf6 gene of E4re#1 and E4re#11 was changed.

[0020] FIG. 10 is a schematic diagram showing the vector in which the antigen F2-Spike/E4orf6 (mPGK) or RF-Spike/E4orf6 (RSV) used in the E4re#13 or 20 vector was introduced into the E1 deletion site, and −12, 27, 42, 57, 318, 421 or 711 bp sequence from the C-terminal region of the E4orf6 coding region were removed.

[0021] FIG. 11 is a diagram showing the results of RCA negative test for the E4re#29 adenoviral vector.

[0022] FIG. 12 is a diagram confirming whether RCA was detected according to passage increase of the E4re#29 adenoviral vector.

[0023] FIG. 13a is a diagram showing the degrees of antigen expression measured in the E4rc#1, 13 and 14 vectors.

[0024] FIG. 13b is a diagram showing the degrees of antigen expression measured in the E4re#13, 19 and 20 vectors.

[0025] FIG. 13c is a diagram showing the degrees of antigen expression measured in the E4re#13 and 29 vectors.

[0026] FIG. 14a is a diagram showing the neutralizing antibody production amount in the E4re#1 vector.

[0027] FIG. 14b is a diagram showing the neutralizing antibody production amount in the E4re#13 and 14 vectors.

[0028] FIG. 14c is a diagram showing the neutralizing antibody production amount in the E4re#13 and 20 vectors.

[0029] FIG. 14d is a diagram showing the neutralizing antibody production amount in the E4re#13 and 29 vectors.

### DESCRIPTION OF THE PREFERRED EMBODIMENTS

[0030] Hereinafter, the present invention is described in detail.

[0031] The present invention provides a recombinant adenoviral vector characterized in that the E4 gene is inserted at the deletion site of the E1 gene in the adenovirus in which the E1, E3 and E4 genes are deleted.

[0032] In the present invention, “vector” refers to a delivery vehicle that carries a cloned gene (or other fragments of cloned DNA) to a target cell.

[0033] The recombinant adenoviral vector has the advantage of being able to use the existing HEK 293 cell line in which the adenovirus E1 gene has been introduced into the genome while minimizing the occurrence of replication competent adenovirus by additionally deleting the E4 gene from the existing E1/E3-deleted adenovirus.

[0034] The deleted E4 gene is characterized in that the E4orf6 (E4 open reading frame 6) gene.

[0035] The deleted E4 gene is a nucleotide sequence of 10 to 1,000 bp of the E4orf6 gene region, preferably a nucleotide sequence of 10 to 800 bp.

[0036] According to a specific embodiment of the present invention, it is preferable to delete a nucleotide sequence having a length of 14 bp or 711 bp of the E4orf6 gene region.

[0037] The said adenovirus may be adenovirus serotype 2 (Ad2), adenovirus serotype 4 (Ad4), adenovirus serotype 5 (Ad5), adenovirus serotype 11 (Ad 11), adenovirus serotype 26 (Ad26), adenovirus serotype 35 (Ad35), chimpanzee adenovirus serotype 68 (ChAd68), fowl adenovirus serotype 9 (FAd9) or porcine adenovirus serotype 3 (PAd3).

[0038] The adenovirus may be a modified form based on Ad5.

[0039] The adenovirus may be an adenovirus (Ad5/35) in which the knob gene of adenovirus serotype 5 (Ad5) is replaced with the knob gene of adenovirus serotype 35 (Ad35).

[0040] The deleted E4 gene is characterized in that it is a region of E4orf6, E4orf6/7 or E4orf4.

[0041] The deleted E4 gene is characterized by a nucleotide sequence having a length of 10 to 1,500 bp, and preferably 14 bp or 1,429 bp.

[0042] The E4orf6 gene is characterized in that the kozak sequence is removed.

[0043] A sequence encoding an antigen protein may be inserted into the deletion site of the E1 gene.

[0044] The sequence encoding the antigen protein can be inserted at the 5′ or 3′ position of the E4orf6 gene, but preferably at the 5′ position of the E4orf6 gene.

[0045] The E4orf6 gene may be expressed in a forward direction or in a reverse direction, and preferably in a forward direction.

[0046] The E4 gene inserted at the deletion site of the E1 gene is expressed by any one promoter selected from the group consisting of EF-1a, mPGK, RSV, CMV, −0.25 kb of E4orf6, −0.5 kb of E4orf6 and −1.0 kb of E4orf6, but not always limited thereto.

[0047] The sequence encoding the antigen protein is characterized in that it is expressed by a cytomegalovirus (CMV) promoter, but not always limited thereto.

[0048] The antigen protein may be a spike protein of SARS-CoV, MERS-CoV or SARS-CoV-2.

[0049] The antigen protein may be a recombinant spike protein in which a cleavage site between S1 spike protein of SARS-CoV, MERS-CoV or SARS-CoV-2 and S2 gene is removed and a linker sequence is introduced.

[0050] The linker may be characterized in that it is composed of (GGGGS)n.

[0051] The n is characterized in that it is an integer of 1 to 5.

[0052] In addition, the present invention provides a vaccine for preventing coronavirus infection, in which a sequence encoding a coronavirus spike protein is inserted into the recombinant adenoviral vector.

[0053] The coronavirus is characterized in that it is SARS-CoV, MERS-CoV or SARS-CoV-2 belonging to Betacoronavirus.

[0054] The genome homology between SARS-CoV-2 and SARS-CoV is as high as 79.6%, and the genome homology between SARS-CoV-2 and MERS-CoV is as high as 50%. In particular, SARS-CoV-2 and MERS-CoV have a similar homology (35%) of a spike protein, which is the target of the present invention, while SARS-CoV-2 and SARS-CoV have a very high spike protein homology (76%).

[0055] The spike protein is characterized in that it is a recombinant spike protein in which a cleavage site between S1 spike protein and S2 gene is removed and a linker sequence is introduced.

[0056] In vaccines, it is important that antigens are secreted in large amounts, but even if they are expressed in large amounts, if they are initially degraded, they do not stimulate immune cells to sufficiently induce an immune response, so it is very important that the expressed antigens have high stability. The recombinant spike protein of the present invention in which S1 and S2 are linked by a linker sequence has a high degree of antigen expression and improved stability, and thus has excellent ability to generate neutralizing antibodies and induce T cell reactivity.

[0057] The term “immune response” may include humoral and cellular immune responses, such as CD4+ or CD8+ cell activation, but not always limited thereto.

[0058] The spike protein (S protein) covers the surface of a coronavirus particle and is a spike-shaped protein used when the coronavirus invades human cells and is composed of S1 and S2 subunits. The spike protein infects the human body by binding to angiotensin converting enzyme 2 (ACE-2) receptor of the human cell, penetrating into the cell and pushing the genetic material (RNA) to replicate the genetic material itself.

[0059] The recombinant protein is characterized in that a cleavage site between the S1 and S2 genes, which are subunits of the spike protein, has been removed.

[0060] The protein is characterized in that a cleavage site between the S1 and S2 genes is removed and linked by a linker sequence.

[0061] The linker is characterized in that it is composed of (GGGGS)n, wherein n is an integer of 1 to 5.

[0062] The domains constituting each protein have a distance (linker sequence length) optimized for interaction according to their unique characteristics, and the structural stability of the protein is exhibited according to the length of the linker sequence. Therefore, n in the protein may preferably be 1 or 3, most preferably n is 1.

[0063] If n exceeds 4, a number of repetitive sequences are generated, and the linker sequence may be deleted by unintentional homologous recombination, and the stability of the protein may be reduced.

[0064] The spike protein antigen linked by the linker sequence is characterized by increased stability.

[0065] In a specific embodiment of the present invention, a replication competent adenovirus that reacquired the E1 gene, which was generated during the production of adenovirus type 5/35 (Ad5/35) in which part of the E4 gene was deleted, exhibited replication incompetence. Even when the E1 gene was acquired by homologous recombination, it was confirmed that adenovirus replication did not occur when the E4orf6 gene was deleted (see FIG. 4). A recombinant adenoviral vector in which the antigen protein and E4orf6 gene were inserted into the deletion site of the E1 gene according to i) the number of nucleotide sequences of the deleted E4, and ii) the order and direction of insertion of the antigen protein and E4orf6 gene was constructed, and adenovirus productivity was evaluated. As a result, it was confirmed that the vectors (E4rc#1 and E4re#11) in which 14 bp of E4orf6 was deleted, the antigen protein was ligated to the 5′ position of the rearranged E4orf6, and the rearranged E4orf6 was expressed forwardly had high adenovirus productivity (Table 2).

[0066] Recombinant adenoviral vectors with a different type of promoter for expressing the E4orf6 rearranged in the E4re#1 and E4re#11 vectors were constructed, and adenovirus productivity was evaluated. As a result, 5 types of vectors with increased productivity (E4re#13, E4re#14, E4re#18, E4re#19 and E4re#20) were confirmed (Table 3).

[0067] Productivity was repeatedly tested for 7 vectors that were evaluated to have excellent productivity (E4re#1, E4rc#11, E4rc#13, E4re#14, E4re#18, E4rc#19 and E4re#20). As a result, 5 types of vectors with similar productivity to the control vector (E4re#13, E4re#14, E4re#18, E4re#19 and E4re#20) were confirmed (Table 4).

[0068] Among the 4 vectors excluding the E4rc#18 with the potential to compromise genetic stability (E4re#13, E4re#14, E4re#19 and E4re#20) from which the −12, 27, 42, 57, 318, 421, and 711 bp sequences from the C-terminal region of the E4orf6 coding region were removed, the E4rc#29 vector, in which the 711 sequence of E4orf6 was removed and the E4rc#13 antigen was introduced, showed high adenovirus productivity.

[0069] Viral stock solution productivity was evaluated in 5 vectors (E4rc#13, E4rc#14, E4rc#19, E4rc#20 and E4re#29). As a result, the productivity was 73 to 98% compared to the control group (Table 6). A cell-based RCA negative test was performed with the E4re#29 adenoviral vector. As a result, replication competent adenovirus (RCA) was not detected (FIG. 11), and it was confirmed that RCA was not detected even when the virus passage increased (FIG. 12). In addition, the intracellular degree of antigen expression was evaluated for 6 vectors (E4rc#1, E4rc#13, E4rc#14, E4re#19, E4re#20 and E4re#29). As a result, it was confirmed that the E4re#13 and E4re#29 vectors had the highest intracellular degree of antigen expression (FIGS. 13a to 13c), and the neutralizing antibody production amount in 5 vectors (E4rc#1, E4re#13, E4rc#14, E4re#20 and E4rc#29) was the same as that of the control group (FIGS. 14a to 14d).

[0070] Therefore, the recombinant adenoviral vector of the present invention can be effectively used as a carrier for various vaccines for diseases or anti-cancer vaccines.

[0071] Hereinafter, the present invention will be described in detail by the following examples and experimental examples.

[0072] However, the following examples and experimental examples are only for illustrating the present invention, and the contents of the present invention are not limited thereto.

### Example 1: Construction of Replication Competent Adenovirus (RCA) Vector and E4orf6-Deleted Adenoviral Vector (pRCA-E4dl355 and pRCA-E4dlO4-7)

[0073] A replication competent adenovirus (RCA) clone that reacquired the E1 gene, which was generated during the production of adenovirus type 5/35 (Ad5/35) was secured, and a pRCA (SEQ. ID. NO: 1, 36,262 bp) adenoviral vector was constructed by introducing a kanamycin resistance gene and a pBR322 origin gene sequence. The pRCA is a form in which the E3 gene is deleted based on adenovirus serotype 5 (Ad5), and a fiber, which is a cell receptor binding site, is substituted with a fiber of adenovirus serotype 35 (Ad35).

[0074] A part of the reverse coding sequence of the E4orf6 gene of the pRCA vector was cut using CRISPR/Cas enzyme and sequence and ligation independent cloning (SLIC) technique to construct a pRCA-E4dl355 (SEQ. ID. NO: 2) (E4orf6 deletion site: 33,918-33,931, 14 bp removed) vector. In addition, a pRCA-E4dlO4-7 (SEQ. ID. NO: 3) (E4 deletion site: 33,238-34,666, 1,429 bp removed) vector in which the entire E4orf6 coding sequence and E4orf4/E4orf6/7, which share a part of the E4orf6 coding sequence, were additionally deleted, was also constructed.

### Example 2: Confirmation of Replication Defectiveness of E4orf6-Deleted Adenoviral Vector

[0075] The control vector pRCA and the E4-deleted vectors pRCA-E4dl355 and pRCA-E4dlO4-7 were produced using AD-293 cell line, and it was confirmed whether the E4 gene-deleted adenovirus was replication-defective.

[0076] Specifically, the AD-293 cell line, about 80% full on a T25 flask, was transformed with 8 μg of each vector along with 20 μl of Lipofectamine 2000 (ThermoFisher, Cat. #: 11668027) to produce an initial adenoviral vector. Two days after the transformation, the cells were divided into two T75 flasks and cultured from 6 days to 14 days after the transformation. When observed under a microscope, if cytopathic effect (CPE) was seen in more than 80% of the cells, it was considered that adenovirus was sufficiently produced and the cells were harvested. If the cytopathic effect was not seen until the 14^{th} day of the transformation, the cells were detached using trypsin and harvested. The harvested cells were disrupted by repeating the process of freezing and thawing in a deep freezer and a 37° C.-water bath incubator three times, which was centrifuged to obtain a supernatant containing adenovirus. For adenovirus amplification, 4×10⁶ AD-293 cells were distributed in a T175 flask and cultured for two days. Two days later, the supernatant containing each adenovirus was infected by 2 ml per T175 flask and further cultured for 48 hours. After observing the cytopathic effect under a microscope, the cells were harvested and disrupted, and centrifuged to obtain a supernatant containing adenovirus. The viral genome was extracted from some of the supernatant by referring to the High Pure Viral Nucleic Acid Kit (Roche) protocol. The amplified virus copy number was confirmed using a primer specific to Ad35 fiber, a cell receptor binding site present in the pRCA vector.

[0077] As a result, as shown in FIG. 4, the pRCA-E4dl355 with partial deletion of the E4 gene and the pRCA-E4dlO4-7 with deletion of all the E4orf4, E4orf6 and E4orf6/7 genes showed no cytopathic effect during the two passages of adenovirus production. As shown in FIG. 5, adenoviral gene replication also did not occur in the above vectors. These results suggest that even if the E1 gene is reacquired by homologous recombination, adenovirus replication does not occur when the E4orf6 gene is deleted.

### Example 3: Construction of Adenoviral Vector with Rearranged E4 Gene

### <3-1> E1 Gene Deletion and Restriction Enzyme Sequence Insertion

[0078] The E1 gene of the replication-defective pRCA-E4dl355 and pRCA-E4dlO4-7 vectors was removed, and the SwaI restriction enzyme site for rearrangement of the E4 gene was inserted.

[0079] As shown in FIG. 6, site-directed mutagenesis by PCR and in-fusion cloning ligation (Clontech, Cat. #: 639648) were used to construct pAdk35-E4dl355 (SEQ. ID. NO: 4) and pAdk35-E4dlO4-7 (SEQ. ID. NO: 5) vectors in which the E1 gene was removed and the SwaI restriction enzyme target sequence was inserted therein.

[0080] Specifically, the regions were amplified using a primer set that binds to the NheI restriction enzyme site in the fiber gene and the front region of the E1 gene, and a primer set that binds to the NheI restriction enzyme site between the pTP and 52K genes and behind the E1 gene. A SwaI restriction enzyme target sequence was added to the primer that binds to the front and back of the E1 gene, and both ends of the PCP products were overlapped with a 15 bp sequence. An intermediate vector in which the E1 gene was removed and the SwaI restriction enzyme target sequence was inserted therein was constructed by infusion cloning ligation using the two PCR products. The intermediate vector was linearized with NheI restriction enzyme, the remaining adenoviral vector region was amplified by PCR, and pAdk35-E4dl355 (SEQ. ID. NO: 4) and pAdk35-E4dlO4-7 (SEQ. ID. NO: 5) vectors were constructed by infusion ligation cloning using the two linearized vectors.

### <3-2> Construction of Shuttle Vector for E4 Gene Rearrangement and Antigen (Spike) Gene Introduction and Adenoviral Vector with Rearranged E4

[0081] Vectors that introduced E4orf6 and antigen genes in the area where the E1 gene of the replication-defective pRCA-E4dl355 and pRCA-E4dlO4-7 vectors was removed were constructed as follows.

[0082] Specifically, pSBbi-Pur was used as a shuttle vector, and an E4orf6 gene expression cassette and an antigen gene expression cassette were sequentially introduced. As an antigen, a nucleotide sequence encoding a protein obtained by replacing the cleavage site between S1 and S2 of the SARS-CoV-2 spike protein with a linker sequence (GGGGS) was used.

[0083] The entire E4orf6 region of the pRCA vector was amplified by PCR and inserted between the EF-1a promoter and the bGH polyA sequence of the pSBbi-Pur vector by infusion ligation cloning to construct pSBbi-E4orf6 vector. Four types of shuttle vectors were constructed by inserting an antigen (spike protein) expression cassette in the forward and reverse directions at the front of the EF-1a sequence and at the rear of the bGH poly of the pSBbi-E4orf6 vector using site-directed mutagenesis and in-fusion cloning ligation. The antigen (spike protein) expression cassette sequentially contains a CMV promoter, a tetracycline operator (Tet O), a spike protein antigen, and a SV40 poly A sequence. After amplification using a primer set for amplifying the Spike/E4orf6 expression cassette, 12 adenoviral vectors expressing the spike protein antigen in which the E4orf6 gene was relocated to the E1-deleted region were constructed by infusion cloning ligation with the pAdk35-E4dl355 and pAdk35-E4dlO4-7 vectors digested with SwaI, as shown in FIG. 7. The differences between the 12 vectors are as follows: 1) E4-deleted region (14 bp deletion or 1.429 bp deletion of E4orf6, 2) location of spike protein and E4orf6 gene (spike protein and E4orf6 or E4orf6 and spike protein), and 3) directionality (forward or reverse).

TABLE 1

| Abbreviation | Full name | SEQ. ID. NO |
|---|---|---|
| 4re#1 | Adk35F2-Spikc/E4orf6- | SEQ. ID. NO: 6 |
| | E4dl355 | |
| 4re#2 | Adk35R2-Spikc/E4orf6- | SEQ. ID. NO: 7 |
| | E4dl355 | |
| 4re#3 | Adk35F2-E4orf6/Spike- | SEQ. ID. NO: 8 |
| | E4dl355 | |
| 4re#4 | Adk35R2-E4orf6/Spike- | SEQ. ID. NO: 9 |
| | E4dl355 | |
| 4re#5 | Adk35F2-Spike/E4orf6- | SEQ. ID. NO: 10 |
| | E4dl04-7 | |
| 4re#6 | Adk35R2-Spike/E4orf6- | SEQ. ID. NO: 11 |
| | E4dl04-7 | |
| 4re#7 | Adk35F2-E4orf6/Spike- | SEQ. ID. NO: 12 |
| | E4dl04-7 | |
| 4re#8 | Adk35R2-E4orf6/Spike- | SEQ. ID. NO: 13 |
| | E4dl04-7 | |
| 4re#9 | Adk35FR-Spike/E4orf6- | SEQ. ID. NO: 14 |
| | E4dl355 | |
| 4re#10 | Adk35FR-E4orf6/Spike- | SEQ. ID. NO: 15 |
| | E4dl355 | |
| 4re#11 | Adk35RF-Spike/E4orf6- | SEQ. ID. NO: 16 |
| | E4dl355 | |
| 4re#12 | Adk35RF-E4orf6/Spike- | SEQ. ID. NO: 17 |
| | E4dl355 | |

### Example 4: Measurement of Adenovirus Productivity of 12 Vectors with Rearranged E4 Gene

[0084] The adenovirus productivity of the 12 vectors with rearranged E4 gene shown in Table 1 was verified using the 293R cell line.

[0085] Specifically, the 293R cell line, about 80% full on a T175 flask, was transformed with 50 rig of each vector along with 100 μl of Lipofectamine 2000 (ThermoFisher, Cat. #: 11668027) to produce an initial adenoviral vector. Two days after the transformation, the cells were divided into four T175 flasks and cultured from 6 days to 14 days after the transformation. When observed under a microscope, if cytopathic effect (CPE) was seen in more than 80% of the cells, it was considered that adenovirus was sufficiently produced and the cells were harvested. If the cytopathic effect was not seen until the 14^{th} day of the transformation, it was determined that the virus productivity was low.

[0086] As a result, as shown in Table 2, it was confirmed that adenovirus was sufficiently produced by the E4re#1 and E4re#11 vectors. The E4re#1 and E4re#11 vectors have the following characteristics: 1) they use a backbone of the pAdk35-E4dl355 vector, 2) the rearranged E4orf6 is located behind the antigen gene (spike protein), and 3) they are expressed in the forward direction.

TABLE 2

| | | Cytopathic | Cytopathic |
|---|---|---|---|
| | | effect | effect (CPE) on |
| Abbreviation | Full name | (Full CPE) | day 14 |
| E4re#1 | pAdk35F2- | 10 | N/A |
| | Spike/E4orf6-E4dl355 | | |
| E4re#2 | Adk35R2- | N/A | 70% |
| | Spike/E4orf6-E4dl355 | | |
| E4re#3 | Adk35F2- | N/A | <1% |
| | E4orf6/Spike-E4dl355 | | |
| E4re#4 | Adk35R2- | N/A | <1% |
| | E4orf6/Spikc-E4dl355 | | |
| E4re#5 | Adk35F2- | N/A | 60% |
| | Spike/E4orf6-E4dlO4- | | |
| | 7 | | |
| E4re#6 | Adk35R2- | N/A | 10% |
| | Spike/E4orf6-E4dlO4- | | |
| | 7 | | |
| E4re#7 | Adk35F2- | N/A | <1% |
| | E4orf6/Spike-E4dlO4- | | |
| | 7 | | |
| E4re#8 | Adk35R2- | N/A | <1% |
| | E4orf6/Spike-E4dlO4- | | |
| | 7 | | |
| E4re#9 | Adk35FR- | N/A | <3% |
| | Spike/E4orf6-E4dl355 | | |
| E4re#10 | Adk35FR- | N/A | <3% |
| | E4orf6/Spike-E4dl355 | | |
| E4re#11 | Adk35RF- | 10 | <3% |
| | Spike/E4orf6-E4dl355 | | |
| E4re#12 | Adk35RF- | N/A | <3% |
| | E4orf6/Spike-E4dl355 | | |

### Example 5: Construction of Vector with Rearranged E4 Gene Containing Modified E4 Gene Promoter

[0087] According to the results of Example 4, the cytopathic effect of the pAdk35-Spike expression vector reaches 90% after 6 to 7 days of transformation. On the other hand, the cytopathic effect of the E4re#1 and E4re#11 vectors reached 90% on day 10 of transformation. These results indicate that the adenoviral genome replication and assembly efficiency of the vector is low or the assembly speed is slow. Since the E4orf6 gene rearranged in the above 12 vectors is expressed by a powerful promoter called EF-1a, unnecessarily strong E4orf6 gene expression may affect the expression of other adenovirus replication-related genes, reducing the efficiency of the overall replication and assembly process. Therefore, the promoter of the E4orf6 gene rearranged in E4re#1 was changed to control the expression level of E4orf6, thereby increasing the replication and assembly efficiency of the adenovirus genome.

[0088] Specifically, the EF-1a promoter of the shuttle vector containing the Spike/E4orf6 expression cassettes of E4re#1 and E4re#11 was removed using a site-directed mutagenesis technique. PCR-amplified mPGK, RSV and CMV promoters, and predicted regions of E4orf6 −0.25 kb, −0.5 kb and −1 kb promoters were introduced into the shuttle vector from which the EF-1a promoter was removed, by in-fusion cloning ligation, respectively. Finally, 11 shuttle vectors with replaced promoters were constructed, and 11 vectors with rearranged E4 (E4re#13 to 24) were constructed by amplifying the Spike/E4orf6 expression cassette and introducing the same into the pAdk35-E4dl355 vector linearized with SwaI as shown in Table 3 and FIG. 9.

[0089] The cytopathic effect of the vectors with rearranged E4 was observed using the 293R cell line, and the productivity was investigated. As a result, it was confirmed that the cytopathic effect of the vector in which the promoter was replaced with the mPGK, RSV, or CMV promoter was advanced by about 2 days.

TABLE 3

| | | | Cytopathic | Cytopathic |
|---|---|---|---|---|
| | | | effect | effect(CPE) |
| Abbreviation | Full name | SEQ. ID. NO | (Full CPE) | on day 14 |
| E4re#13 | pAdk35F2- | SEQ. ID. NO: | 8 | N/A |
| | Spikc/E4orf6 | 18 | | |
| | (mPGK)- | | | |
| | E4dl355 | | | |
| E4re#14 | pAdk35F2- | SEQ. ID. NO: | 8 | N/A |
| | Spike/E4orf6 | 19 | | |
| | (RSV)- | | | |
| | E4dl355 | | | |
| E4re#15 | pAdk35F2- | SEQ. ID. NO: | N/A | 50% |
| | Spike/E4orf6 | 20 | | |
| | (−0.25 kb)- | | | |
| | E4dl355 | | | |
| E4re#16 | pAdk35F2- | SEQ. ID. NO: | N/A | 50% |
| | Spikc/E4orf6 | 21 | | |
| | (−0.5 kb)- | | | |
| | pE4dl355 | | | |
| E4re#17 | pAdk35F2- | SEQ. ID. NO: | N/A | 50% |
| | Spike/E4orf6 | 22 | | |
| | (−1 kb)- | | | |
| | E4dlO4-7 | | | |
| E4re#18 | pAdk35F2- | SEQ. ID. NO: | 8 | N/A |
| | Spike/E4orf6 | 23 | | |
| | (CMV)- | | | |
| | E4dlO4-7 | | | |
| E4re#19 | pAdk35RF- | SEQ. ID. NO: | 8 | N/A |
| | Spikc/E4orf6 | 24 | | |
| | (mPGK)- | | | |
| | E4dl355 | | | |
| E4re#20 | pAdk35RF- | SEQ. ID. NO: | 8 | N/A |
| | Spike/E4orf6 | 25 | | |
| | (RSV)- | | | |
| | E4dl355 | | | |
| E4re#21 | pAdk35RF- | SEQ. ID. NO: | N/A | 70% |
| | Spike/E4orf6 | 26 | | |
| | (−0.25 kb)- | | | |
| | E4dl355 | | | |
| E4re#22 | pAdk35RF- | SEQ. ID. NO: | N/A | 50% |
| | Spike/E4orf6 | 27 | | |
| | (−0.5 kb)-E4dl355 | | | |
| E4re#23 | pAdk35RF- | SEQ. ID. NO: | N/A | 50% |
| | Spike/E4orf6 | 28 | | |
| | (−1 kb)- | | | |
| | E4dl355 | | | |

### Example 6: Comparison of Productivity of Vectors with Cytopathic Effect Observed within 14 Days

[0090] Cells were transformed with 12.5 ug of each vector in a T25 flask using 7 vectors (E4re#1, 11, 13, 14, 18, 19 and 20) whose cytopathic effect was observed within 14 days in the 293R cell line, and the productivity was compared.

[0091] Specifically, when the cytopathic effect of the 293R cell line reached 90% or more, the cells were harvested and disrupted to obtain the virus. 2 ml of the obtained virus was reinfected into 293R cells in the size of one T175 flask and cultured for two days. After harvesting and disrupting the cells, the viral genome was extracted, and the copy number of the viral genome was calculated using k35-specific primers and multiplied by 0.7 to calculate the particle number of each virus produced in the T175 flask. The relative production was compared using pAdk35-Spike as a control vector.

[0092] As a result, as shown in Table 4, E4rc#1 and E4re#11 showed about 45% of the production of the control vector, and the remaining 5 vectors (E4re#13, 14, 18, 19 and 20) showed productions of 83% to 109% of the control vector. It was confirmed that the 5 vectors showed 79% to 99% productivity similar to that of the control vector through repeated experiments.

TABLE 4

| | | | Average | | |
|---|---|---|---|---|---|
| | | | cycle | Total virus | |
| | | Conc. | threshold | particle | Relative |
| Batch | Virus | (μg/ [symbol] ) | (Cq) | (VP) | % |
| #1 | Control | 0.110 | 14.8 | 5.69E+12 | 100% |
| | E4rc#1 | 0.104 | 15.7 | 2.64E+12 | 46% |
| | E4re#11 | 0.104 | 15.7 | 2.52E+12 | 44% |
| | E4re#13 | 0.089 | 14.8 | 4.71E+12 | 83% |
| | E4re#14 | 0.099 | 14.6 | 5.73E+12 | 101% |
| | E4rc#18 | 0.095 | 14.5 | 6.19E+12 | 109% |
| | E4re#19 | 0.085 | 14.7 | 4.79E+12 | 84% |
| | E4re#20 | 0.098 | 14.7 | 5.26E+12 | 92% |
| #2 | CLA-04 | 0.089 | 14.8 | 4.49E+12 | 100% |
| | E4re#13 | 0.085 | 14.8 | 4.43E+12 | 99% |
| | E4re#14 | 0.074 | 14.6 | 4.35E+12 | 97% |
| | E4re#18 | 0.074 | 14.7 | 4.07E+12 | 91% |
| | E4re#19 | 0.065 | 14.7 | 3.54E+12 | 79% |
| | E4re#20 | 0.065 | 14.7 | 3.57E+12 | 79% |

### Example 7: Optimization Process to Minimize RCA Appearance and Maintain Productivity

[0093] Among the final five vectors (E4re#13, 14, 18, 19 and 20), E4rc#18 uses the CMV promoter to express both the gene expressing the spike protein and the E4orf6 rearrangement gene. This may act as a factor that inhibits genetic stability when adenovirus is produced on a large scale by subculture several times, and thus the vector was excluded from the candidate vectors.

[0094] In addition, the pAdk35-E4dl355 vector backbone is excellent in terms of productivity, but the E4-deleted region is a sequence consisting of 14 nucleotides in the middle, and there are two homologous sequence regions with the normal E4orf6 gene rearranged in the E1-deleted region. In the course of virus proliferation, homologous recombination within or between vectors may occur, resulting in the recovery of the E4-deleted region and the appearance of RCA. Therefore, an optimization process for minimizing the possibility of RCA appearance and maximally maintaining productivity by changing the E4-deleted region to the C-terminal site from the middle sequence consisting of 14 nucleotides was performed as follows.

[0095] Specifically, as shown in FIG. 10, sequences of −12, 27, 42, 57, 318, 421, and 711 bp from the C-terminal region of the E4orf6 coding region were removed. In addition, the antigens F2-Spike/E4orf6 (mPGK) and RF-Spike/E4orf6 (RSV) used in the E4re#13 and 20 vectors were introduced into the E1-deleted region, and in order to further reduce the expression of E4orf6, a vector in which the Kozak sequence in front of the rearranged E4orf6 gene in the E4re#13 vector was removed was constructed.

TABLE 5

| Abbreviation | Full name | SEQ. ID. NO |
|---|---|---|
| E4re#27 | Adk35F2-Spike/E4orf6(RSV)- | SEQ. ID. NO: 29 |
| | E4dl-711 | |
| E4re#28 | Adk35RF-Spike/E4orf6(RSV)- | SEQ. ID. NO: 30 |
| | E4dl-711 | |
| E4re#29 | Adk35F2-Spike/E4orf6(mPGK)- | SEQ. ID. NO: 31 |
| | E4dl-711 | |
| E4re#30 | Adk35F2-Spike/E4orf6(CMV)- | SEQ. ID. NO: 32 |
| | E4dl-711 | |
| E4re#31 | Adk35RF-Spike/E4orf6(mPGK)- | SEQ. ID. NO: 33 |
| | E4dl-711 | |
| E4re#32 | Adk35F2-Spike/E4orf6(mPGK)- | SEQ. ID. NO: 34 |
| | E4dl-12 | |
| E4re#33 | Adk35F2-Spike/E4orf6(mPGK)- | SEQ. ID. NO: 35 |
| | E4dl-27 | |
| E4re#34 | Adk35F2-Spike/E4orf6(mPGK)- | SEQ. ID. NO: 36 |
| | E4dl-42 | |
| E4re#35 | Adk35F2-Spike/E4orf6(mPGK)- | SEQ. ID. NO: 37 |
| | E4dl-57 | |
| E4re#36 | Adk35F2-Spike/E4orf6(mPGK)- | SEQ. ID. NO: 38 |
| | E4dl-318 | |
| E4re#37 | Adk35F2-Spikc/E4orf6(mPGK)- | SEQ. ID. NO: 39 |
| | E4dl-421 | |
| E4re#38 | Adk35F2-S04/E406(mPGK)(no | SEQ. ID. NO: 40 |
| | kozak)-E4dl-355 | |
| E4re#39 | Adk35RF-Spike/E4orf6(RSV)- | SEQ. ID. NO: 41 |
| | E4dl-12 | |
| E4re#40 | Adk35RF-Spike/E4orf6(RSV)- | SEQ. ID. NO: 42 |
| | E4dl-27 | |
| E4re#41 | Adk35RF-Spike/E4orf6(RSV)- | SEQ. ID. NO: 43 |
| | E4dl-42 | |
| E4re#42 | Adk35RF-Spike/E4orf6(RSV)- | SEQ. ID. NO: 44 |
| | E4dl-57 | |
| E4re#43 | Adk35RF-Spike/E4orf6(RSV)- | SEQ. ID. NO: 45 |
| | E4dl-318 | |
| E4re#44 | Adk35RF-Spike/E4orf6(RSV)- | SEQ. ID. NO: 46 |
| | E4dl-421 | |

### Example 8: Verification of Adenovirus Productivity

[0096] To verify the mature adenovirus productivity of the E4re#13, 14, 19, and 29 vectors, adenovirus was produced at CellSTACK 10 (CS10) scale, purified with cesium chloride (CsCl), and then 293R cells were re-infected with the virus at 500 vp/cell at CS10 scale. The cells were harvested, disrupted, purified, and adenovirus was purified by FPLC, and the virus particle content was measured by HPLC to confirm the productivity of the virus stock solution.

[0097] As a result, it was confirmed that the vectors with rearranged E4 exhibited 73% to 98% of the productivity of the control vector.

TABLE 6

| | Control | | | | | | | |
|---|---|---|---|---|---|---|---|---|
| Sample | vector | | E4re#13 | E4re#14 | E4re#20 | E4re#19 | E4re#29-1 | E4re#29-2 |
| Unit content | 3.03E+13 | 3.55E+13 | 3.24E+13 | 2.59E+13 | 3.05E+13 | 2.41E+13 | 2.01E+13 | 2.25E+13 |
| (VP/CS10) | | | | | | | | |

| | | | | | | | |
|---|---|---|---|---|---|---|---|
| Productivity | 100% | 98% | 79% | 93% | 73% | 61% | 68% |

### Example 9: Verification of Replication Competent Adenovirus Appearance by E4re#29 Adenoviral Vector

[0098] A cell-based RCA negative test was performed with the E4re#29 adenoviral vector. After infecting 36 T175 flasks of A549 cells with 4.14E+10 VP, the cells were harvested and reinfection was repeated 4 times. One week after the last infection, the cytopathic effect was confirmed under a microscope.

[0099] As a result, as shown in FIG. 11, replication competent adenovirus (RCA) was not detected in all the 36 flasks.

[0100] The E4re#29 adenoviral vector was subcultured in the HEK293R production cell line to obtain passage 4, passage 5, and passage 6 viruses. A549 cells were infected with each passage virus at 3E+10 VP, and viral DNA was extracted after 10 days. The presence or absence of replication competent adenovirus was confirmed by quantitative PCR using E1 gene-specific primers.

[0101] As a result, as shown in FIG. 12, it was confirmed that RCA was not detected even when the virus passage increased.

### Example 10: Comparison of Intracellular Degree of Antigen Expression of Vectors with Rearranged E4

[0102] In order to compare the productivity, degree of spike protein antigen expression, and immunogenicity of the final four vectors (E4re#13, 14, 19, 20 and 29), passage 2 viruses were produced, isolated, and purified at CellSTACK 10 (CS10) scale. Cesium chloride (CsCl) density gradient centrifugation was used as a purification method, purification was performed over the first (1.2 g/ml CsCl+1.4 g/ml CsCl, 32,000 RPM, 90 minutes) and second (1.35 g/mi CsCl, 32,000 RPM, 18 hours) rounds, and complete adenoviruses were produced through dialysis (20 mM Tris-HCl, 25 mM sodium chloride, 2.5% glycerol).

[0103] To compare the intracellular degree of antigen expression by the E4rc#1, 13, 14, 19, 20 and 29 vectors, the degree of antigen expression in the A549 cell line was measured by flow cytometry (FACS).

[0104] Specifically, for flow cytometry, A549 cells were distributed in a 96-well culture dish at the density of 2.5×10⁵ cells per well, and then each vector and the control CLA-04 vector were inoculated into the cells at 500, 1000 or 2000 vp/cell. Then, the cells were cultured for 24 hours. Thereafter, the cells in each well were transferred to each 1.5 ml tube, and 500 μl of FACS buffer was added to each tube and centrifuged (5000 rpm, 3 minutes, 4° C.). After removing the supernatant, 50 pf of viability indicator dye (eFluor™ 450, ebioscience, cat #:65-0863-14) diluted 1:1000 was added to each tube, and surface staining was performed at 4° C. for 30 minutes.

[0105] To detect the antigens expressed inside the cells, the cell fixation/permeation concentrate (ebioscience, Cat. #: 00-5123-43) was diluted 1:4 in the cell fixation/permeation diluent (ebioscience, Cat. #: 00-5223-56), and 100 μl of the solution was added to each tube, followed by cell fixation/permeation at 4° C. for 30 minutes. Spike antigen staining was performed with a solution (antibody conc.: 0.4 μg/ml) of SARS-CoV-2 spike protein antibody (GeneTex, Cat. #: GTX632604) diluted 1:2500 in a permeation buffer (ebioscience, Cat. #: 00-8333-56) at 4° C. for 1 hour, and washed. Then antigen staining was performed with a solution (antibody conc.: 2 μg/ml) of APC Goat anti-mouse IgG antibody (Biolegend, Cat: 405308), a secondary antibody, diluted 1:100 at 4° C. for 30 minutes. After the staining reaction, 300 μl of buffer was added to each sample and the degree of antigen expression was measured by flow cytometry (BD bioscience, LSRFORESSA).

[0106] As a result, as shown in FIGS. 13a to 13c, it was confirmed that the E4re#13 and E4re#29 vectors showed the highest degree of antigen expression, which is the ability to produce proteins.

### Example 11: Comparison of Neutralizing Antibody Production by Vectors with Rearranged E4

[0107] E4re#1, 13, 14, 20 and 29 vectors were intramuscularly injected into 6- to 7-week-old BALB/c mice, six mice per group. Approximately 300 μl of blood samples were collected by orbital blood sampling from mice at 2-3 weeks after administration. Then, plasma was separated by centrifugation (8000 rpm, 10 minutes, 20° C.), and the amount of neutralizing antibodies present in the blood was measured by enzyme-linked immunosorbent assay (ELISA).

[0108] Particularly, for the enzyme-linked immunosorbent assay, a spike protein (Acro Biosystems, Cat. #: SPN-C52H84) was dissolved in PBSN (PBS 1 L+Sodium Azide 0.01 g) and coated on a 96-well plate (100 ng/well), followed by reaction at 4° C. for 16 hours. After 16 hours of coating the 96-well plate, the coating protein was removed, washed three times with PBS, and then 150 μl of blocking buffer (PBSN+BSA 1%) was added to each well, followed by reaction at 37° C. for 90 minutes. During the reaction, plasma was diluted 6400-fold in dilution buffer (PBSN+0.1% BSA+0.05% Tween-20), and after the blocking reaction was completed, the plate was washed three times with PBS, and then 50 μl of the diluted plasma sample was added to each well, followed by reaction at 37° C. for 3 hours. Upon completion of the reaction, the plate was washed three times with PBS. The secondary antibodies GAM-IgG-HRP (southernbiotech, Cat. #: 1030-05) and GAM-IgM-HRP (southernbiotech, Cat. #: 1020-05) were diluted 1000-fold in dilution buffer and added to the plate (50 pf/well), followed by reaction at 37° C. for 2 hours. Then, the secondary antibodies were removed from the plate, the plate was washed five times with PBS, and a chromogenic reagent (TMB Peroxidase Substrate buffer, ROCKLAND, Cat. #: TMBE-1000) was added to the plate (50 μl/well), followed by color development for 15 minutes. The color development was terminated by adding 0.25 N HCl (50 ul/well), and the sample was analyzed at a wavelength of 450 nm with a microreader.

[0109] As a result, as shown in FIGS. 14a to 14d, it was confirmed that the amount of antibody production by the vectors #1, 13, 14, 20 and 29 was equal to that of the control vector, CLA-04.

1. A recombinant adenoviral vector characterized in that the E4 gene is inserted in the E1 gene-deleted region of an E1/E3/E4-deleted adenovirus.

2. The recombinant adenoviral vector according to claim 1, wherein the E4 gene is an E4orf6 (E4 open reading frame 6) gene.

3. The recombinant adenoviral vector according to claim 1, wherein the deleted E4 gene is a nucleotide sequence of 10 to 1,000 bp in length of the E4orf6 gene region.

4. The recombinant adenoviral vector according to claim 1, wherein the adenovirus is Ad2, Ad4, Ad5, Ad11, Ad26, Ad35, Ad5/35, ChAd68, FAd9 or PAd3.

5. The recombinant adenoviral vector according to claim 1, wherein the deleted E4 gene is an E4orf6, E4orf6/7 or E4orf4 region.

6. The recombinant adenoviral vector according to claim 5, wherein the deleted E4 gene is a nucleotide sequence of 10 to 1,500 bp in length.

7. The recombinant adenoviral vector according to claim 1, wherein the E4 gene inserted into the E1 gene-deleted region is an E4orf6 gene.

8. The recombinant adenoviral vector of claim 7, wherein the E4orf6 gene is characterized in that the kozak sequence has been removed therefrom.

9. The recombinant adenoviral vector according to claim 1, wherein the vector is characterized in that a sequence encoding an antigen protein is inserted in the E1 gene-deleted region.

10. The recombinant adenoviral vector according to claim 9, wherein the sequence encoding the antigen protein is inserted at the 5′ position of the E4orf6 gene.

11. The recombinant adenoviral vector according to claim 10, wherein the E4orf6 gene is expressed in a forward direction.

12. The recombinant adenoviral vector according to claim 1, wherein the E4 gene inserted in the E1 gene-deleted region is expressed by a promoter selected from the group consisting of EF-1a, mPGK, RSV, CMV, −0.25 kb of E4orf6, −0.5 kb of E4orf6, and −1.0 kb of E4orf6.

13. The recombinant adenoviral vector according to claim 9, wherein the sequence encoding the antigen protein is expressed by a cytomegalovirus (CMV) promoter.

14. A vaccine for preventing coronavirus infection in which a sequence encoding a coronavirus spike protein is inserted into the vector of claim 1.

15. The vaccine for preventing coronavirus infection according to claim 14, wherein the coronavirus is SARS-CoV, MERS-CoV or SARS-CoV-2.

16. The vaccine for preventing coronavirus infection according to claim 14, wherein the spike protein is a recombinant spike protein in which a cleavage recognition sequence between the S1 and S2 genes of the spike protein is removed and a linker sequence is introduced therein.

17. The vaccine for preventing coronavirus infection according to claim 16, wherein the linker is composed of (GGGGS)n.

18. The vaccine for preventing coronavirus infection according to claim 17, wherein the n is an integer of 1 to 5.

The application's sequence listing, which the Patent Office published only in electronic form, follows.

SEQUENCE LISTING (46 sequences)

SEQ ID NO: 1 - DNA, 36262 bp, Artificial Sequence
  pRCA
ttaattaagaattaattcgatcctgaatggcgaatggacgcgccctgtagcggcgcattaagcgcggcgggtgtggtggttacgcgcagcgtgaccgctacacttgccagcgccctagcgcccgctcctttcgctttcttcccttcctttctcgccacgttcgccggctttccccgtcaagctctaaatcgggggctccctttagggttccgatttagtgctttacggcacctcgaccccaaaaaacttgattagggtgatggttcacgtagtgggccatcgccctgatagacggtttttcgccctttgacgttggagtccacgttctttaatagtggactcttgttccaaactggaacaacactcaaccctatctcggtctattcttttgatttataagggattttgccgatttcggcctattggttaaaaaatgagctgatttaacaaaaattttaacaaaattcagaagaactcgtcaagaaggcgatagaaggcgatgcgctgcgaatcgggagcggcgataccgtaaagcacgaggaagcggtcagcccattcgccgccaagctcttcagcaatatcacgggtagccaacgctatgtcctgatagcggtccgccacacccagccggccacagtcgatgaatccagaaaagcggccattttccaccatgatattcggcaagcaggcatcgccatgggtcacgacgagatcctcgccgtcgggcatgctcgccttgagcctggcgaacagttcggctggcgcgagcccctgatgctcttcgtccagatcatcctgatcgacaagaccggcttccatccgagtacgtgctcgctcgatgcgatgtttcgcttggtggtcgaatgggcaggtagccggatcaagcgtatgcagccgccgcattgcatcagccatgatggatactttctcggcaggagcaaggtgagatgacaggagatcctgccccggcacttcgcccaatagcagccagtcccttcccgcttcagtgacaacgtcgagcacagctgcgcaaggaacgcccgtcgtggccagccacgatagccgcgctgcctcgtcttgcagttcattcagggcaccggacaggtcggtcttgacaaaaagaaccgggcgcccctgcgctgacagccggaacacggcggcatcagagcagccgattgtctgttgtgcccagtcatagccgaatagcctctccacccaagcggccggagaacctgcgtgcaatccatcttgttcaatcatgcgaaacgatcctcatcctgtctcttgatcagagcttgatcccctgcgccatcagatccttggcggcaagaaagccatccagtttactttgcagggcttcccaaccttaccagagggcgccccagctggcaattccggttcgcttgctgtccataaaaccgcccagtctagctatcgccatgtaagcccactgcaagctacctgctttctctttgcgcttgcgttttcccttgtccagatagcccagtagctgacattcatccggggtcagcaccgtttctgcggactggctttctacgtgaaaaggatctaggtgaagatcctttttgataatctcatggctgcagcaatggcaacaacgttgcgcaaactattaactggcgaactacttactctagcttcccggcaacaattaatagactggatggaggcggataaagttgcaggaccacttctgcgctcggcccttccggctggctggtttattgctgataaatctggagccggtgagcgtgggtctcgcggtatcattgcagcactggggccagatggtaagccctcccgtatcgtagttatctacacgacggggagtcaggcaactatggatgaacgaaatagacagatcgctgagataggtgcctcactgattaagcattggtaactgtcagaccaagtttactcatatatactttagattgatttaaaacttcatttttaatttaaaaggatctaggtgaagatcctttttgataatctcatgaccaaaatcccttaacgtgagttttcgttccactgagcgtcagaccccgtagaaaagatcaaaggatcttcttgagatcctttttttctgcgcgtaatctgctgcttgcaaacaaaaaaaccaccgctaccagcggtggtttgtttgccggatcaagagctaccaactctttttccgaaggtaactggcttcagcagagcgcagataccaaatactgtccttctagtgtagccgtagttaggccaccacttcaagaactctgtagcaccgcctacatacctcgctctgctaatcctgttaccagtggctgctgccagtggcgataagtcgtgtcttaccgggttggactcaagacgatagttaccggataaggcgcagcggtcgggctgaacggggggttcgtgcacacagcccagcttggagcgaacgacctacaccgaactgagatacctacagcgtgagctatgagaaagcgccacgcttcccgaagggagaaaggcggacaggtatccggtaagcggcagggtcggaacaggagagcgcacgagggagcttccagggggaaacgcctggtatctttatagtcctgtcgggtttcgccacctctgacttgagcgtcgatttttgtgatgctcgtcaggggggcggagcctatggaaaaacgccagcaacgcggcctttttacggttcctggccttttgctggccttttgctcacatgttctttcctgcgttatcccctgattctgtggataaccgtattaccgcctttgagtgagctgataccgctcgccgcagccgaacgaccgagcgcagcgagtcagtgagcgaggaagcggaagagcgcctgatgcggtattttctccttacgcatctgtgcggtatttcacaccgcatatggatccatgcatgttaattaacatcatcaataatataccttattttggattgaagccaatatgataatgagggggtggagtttgtgacgtggcgcggggcgtgggaacggggcgggtgacgtagtagtgtggcggaagtgtgatgttgcaagtgtggcggaacacatgtaagcgacggatgtggcaaaagtgacgtttttggtgtgcgccggtgtacacaggaagtgacaattttcgcgcggttttaggcggatgttgtagtaaatttgggcgtaaccgagtaagatttggccattttcgcgggaaaactgaataagaggaagtgaaatctgaataattttgtgttactcatagcgcgtaatatttgtctagggccgcggggactttgaccgtttacgtggagactcgcccaggtgtttttctcaggtgttttccgcgttccgggtcaaagttggcgttttattattatagtcagctgacgtgtagtgtatttatacccggtgagttcctcaagaggccactcttgagtgccagcgagtagagttttctcctccgagccgctccgacaccgggactgaaaatgagacatattatctgccacggaggtgttattaccgaagaaatggccgccagtcttttggaccagctgatcgaagaggtactggctgataatcttccacctcctagccattttgaaccacctacccttcacgaactgtatgatttagacgtgacggcccccgaagatcccaacgaggaggcggtttcgcagatttttcccgactctgtaatgttggcggtgcaggaagggattgacttactcacttttccgccggcgcccggttctccggagccgcctcacctttcccggcagcccgagcagccggagcagagagccttgggtccggtttctatgccaaaccttgtaccggaggtgatcgatcttacctgccacgaggctggctttccacccagtgacgacgaggatgaagagggtgaggagtttgtgttagattatgtggagcaccccgggcacggttgcaggtcttgtcattatcaccggaggaatacgggggacccagatattatgtgttcgctttgctatatgaggacctgtggcatgtttgtctacagtaagtgaaaattatgggcagtgggtgatagagtggtgggtttggtgtggtaattttttttttaatttttacagttttgtggtttaaagaattttgtattgtgatttttttaaaaggtcctgtgtctgaacctgagcctgagcccgagccagaaccggagcctgcaagacctacccgccgtcctaaaatggcgcctgctatcctgagacgcccgacatcacctgtgtctagagaatgcaatagtagtacggatagctgtgactccggtccttctaacacacctcctgagatacacccggtggtcccgctgtgccccattaaaccagttgccgtgagagttggtgggcgtcgccaggctgtggaatgtatcgaggacttgcttaacgagcctgggcaacctttggacttgagctgtaaacgccccaggccataaggtgtaaacctgtgattgcgtgtgtggttaacgcctttgtttgctgaatgagttgatgtaagtttaataaagggtgagataatgtttaacttgcatggcgtgttaaatggggcggggcttaaagggtatataatgcgccgtgggctaatcttggttacatctgacctcatggaggcttgggagtgtttggaagatttttctgctgtgcgtaacttgctggaacagagctctaacagtacctcttggttttggaggtttctgtggggctcatcccaggcaaagttagtctgcagaattaaggaggattacaagtgggaatttgaagagcttttgaaatcctgtggtgagctgtttgattctttgaatctgggtcaccaggcgcttttccaagagaaggtcatcaagactttggatttttccacaccggggcgcgctgcggctgctgttgcttttttgagttttataaaggataaatggagcgaagaaacccatctgagcggggggtacctgctggattttctggccatgcatctgtggagagcggttgtgagacacaagaatcgcctgctactgttgtcttccgtccgcccggcgataataccgacggaggagcagcagcagcagcaggaggaagccaggcggcggcggcaggagcagagcccatggaacccgagagccggcctggaccctcgggaatgaatgttgtacaggtggctgaactgtatccagaactgagacgcattttgacaattacagaggatgggcaggggctaaagggggtaaagagggagcggggggcttgtgaggctacagaggaggctaggaatctagcttttagcttaatgaccagacaccgtcctgagtgtattacttttcaacagatcaaggataattgcgctaatgagcttgatctgctggcgcagaagtattccatagagcagctgaccacttactggctgcagccaggggatgattttgaggaggctattagggtatatgcaaaggtggcacttaggccagattgcaagtacaagatcagcaaacttgtaaatatcaggaattgttgctacatttctgggaacggggccgaggtggagatagatacggaggatagggtggcctttagatgtagcatgataaatatgtggccgggggtgcttggcatggacggggtggttattatgaatgtaaggtttactggccccaattttagcggtacggttttcctggccaataccaaccttatcctacacggtgtaagcttctatgggtttaacaatacctgtgtggaagcctggaccgatgtaagggttcggggctgtgccttttactgctgctggaagggggtggtgtgtcgccccaaaagcagggcttcaattaagaaatgcctctttgaaaggtgtaccttgggtatcctgtctgagggtaactccagggtgcgccacaatgtggcctccgactgtggttgcttcatgctagtgaaaagcgtggctgtgattaagcataacatggtatgtggcaactgcgaggacagggcctctcagatgctgacctgctcggacggcaactgtcacctgctgaagaccattcacgtagccagccactctcgcaaggcctggccagtgtttgagcataacatactgacccgctgttccttgcatttgggtaacaggaggggggtgttcctaccttaccaatgcaatttgagtcacactaagatattgcttgagcccgagagcatgtccaaggtgaacctgaacggggtgtttgacatgaccatgaagatctggaaggtgctgaggtacgatgagacccgcaccaggtgcagaccctgcgagtgtggcggtaaacatattaggaaccagcctgtgatgctggatgtgaccgaggagctgaggcccgatcacttggtgctggcctgcacccgcgctgagtttggctctagcgatgaagatacagattgaggtactgaaatgtgtgggcgtggcttaagggtgggaaagaatatataaggtgggggtcttatgtagttttgtatctgttttgcagcagccgccgccgccatgagcaccaactcgtttgatggaagcattgtgagctcatatttgacaacgcgcatgcccccatgggccggggtgcgtcagaatgtgatgggctccagcattgatggtcgccccgtcctgcccgcaaactctactaccttgacctacgagaccgtgtctggaacgccgttggagactgcagcctccgccgccgcttcagccgctgcagccaccgcccgcgggattgtgactgactttgctttcctgagcccgcttgcaagcagtgcagcttcccgttcatccgcccgcgatgacaagttgacggctcttttggcacaattggattctttgacccgggaacttaatgtcgtttctcagcagctgttggatctgcgccagcaggtttctgccctgaaggcttcctcccctcccaatgcggtttaaaacataaataaaaaaccagactctgtttggatttggatcaagcaagtgtcttgctgtctttatttaggggttttgcgcgcgcggtaggcccgggaccagcggtctcggtcgttgagggtcctgtgtattttttccaggacgtggtaaaggtgactctggatgttcagatacatgggcataagcccgtctctggggtggaggtagcaccactgcagagcttcatgctgcggggtggtgttgtagatgatccagtcgtagcaggagcgctgggcgtggtgcctaaaaatgtctttcagtagcaagctgattgccaggggcaggcccttggtgtaagtgtttacaaagcggttaagctgggatgggtgcatacgtggggatatgagatgcatcttggactgtatttttaggttggctatgttcccagccatatccctccggggattcatgttgtgcagaaccaccagcacagtgtatccggtgcacttgggaaatttgtcatgtagcttagaaggaaatgcgtggaagaacttggagacgcccttgtgacctccaagattttccatgcattcgtccataatgatggcaatgggcccacgggcggcggcctgggcgaagatatttctgggatcactaacgtcatagttgtgttccaggatgagatcgtcataggccatttttacaaagcgcgggcggagggtgccagactgcggtataatggttccatccggcccaggggcgtagttaccctcacagatttgcatttcccacgctttgagttcagatggggggatcatgtctacctgcggggcgatgaagaaaacggtttccggggtaggggagatcagctgggaagaaagcaggttcctgagcagctgcgacttaccgcagccggtgggcccgtaaatcacacctattaccgggtgcaactggtagttaagagagctgcagctgccgtcatccctgagcaggggggccacttcgttaagcatgtccctgactcgcatgttttccctgaccaaatccgccagaaggcgctcgccgcccagcgatagcagttcttgcaaggaagcaaagtttttcaacggtttgagaccgtccgccgtaggcatgcttttgagcgtttgaccaagcagttccaggcggtcccacagctcggtcacctgctctacggcatctcgatccagcatatctcctcgtttcgcgggttggggcggctttcgctgtacggcagtagtcggtgctcgtccagacgggccagggtcatgtctttccacgggcgcagggtcctcgtcagcgtagtctgggtcacggtgaaggggtgcgctccgggctgcgcgctggccagggtgcgcttgaggctggtcctgctggtgctgaagcgctgccggtcttcgccctgcgcgtcggccaggtagcatttgaccatggtgtcatagtccagcccctccgcggcgtggcccttggcgcgcagcttgcccttggaggaggcgccgcacgaggggcagtgcagacttttgagggcgtagagcttgggcgcgagaaataccgattccggggagtaggcatccgcgccgcaggccccgcagacggtctcgcattccacgagccaggtgagctctggccgttcggggtcaaaaaccaggtttcccccatgctttttgatgcgtttcttacctctggtttccatgagccggtgtccacgctcggtgacgaaaaggctgtccgtgtccccgtatacagacttgagaggcctgtcctcgagcggtgttccgcggtcctcctcgtatagaaactcggaccactctgagacaaaggctcgcgtccaggccagcacgaaggaggctaagtgggaggggtagcggtcgttgtccactagggggtccactcgctccagggtgtgaagacacatgtcgccctcttcggcatcaaggaaggtgattggtttgtaggtgtaggccacgtgaccgggtgttcctgaaggggggctataaaagggggtgggggcgcgttcgtcctcactctcttccgcatcgctgtctgcgagggccagctgttggggtgagtactccctctgaaaagcgggcatgacttctgcgctaagattgtcagtttccaaaaacgaggaggatttgatattcacctggcccgcggtgatgcctttgagggtggccgcatccatctggtcagaaaagacaatctttttgttgtcaagcttggtggcaaacgacccgtagagggcgttggacagcaacttggcgatggagcgcagggtttggtttttgtcgcgatcggcgcgctccttggccgcgatgtttagctgcacgtattcgcgcgcaacgcaccgccattcgggaaagacggtggtgcgctcgtcgggcaccaggtgcacgcgccaaccgcggttgtgcagggtgacaaggtcaacgctggtggctacctctccgcgtaggcgctcgttggtccagcagaggcggccgcccttgcgcgagcagaatggcggtagggggtctagctgcgtctcgtccggggggtctgcgtccacggtaaagaccccgggcagcaggcgcgcgtcgaagtagtctatcttgcatccttgcaagtctagcgcctgctgccatgcgcgggcggcaagcgcgcgctcgtatgggttgagtgggggaccccatggcatggggtgggtgagcgcggaggcgtacatgccgcaaatgtcgtaaacgtagaggggctctctgagtattccaagatatgtagggtagcatcttccaccgcggatgctggcgcgcacgtaatcgtatagttcgtgcgagggagcgaggaggtcgggaccgaggttgctacgggcgggctgctctgctcggaagactatctgcctgaagatggcatgtgagttggatgatatggttggacgctggaagacgttgaagctggcgtctgtgagacctaccgcgtcacgcacgaaggaggcgtaggagtcgcgcagcttgttgaccagctcggcggtgacctgcacgtctagggcgcagtagtccagggtttccttgatgatgtcatacttatcctgtcccttttttttccacagctcgcggttgaggacaaactcttcgcggtctttccagtactcttggatcggaaacccgtcggcctccgaacggtaagagcctagcatgtagaactggttgacggcctggtaggcgcagcatcccttttctacgggtagcgcgtatgcctgcgcggccttccggagcgaggtgtgggtgagcgcaaaggtgtccctgaccatgactttgaggtactggtatttgaagtcagtgtcgtcgcatccgccctgctcccagagcaaaaagtccgtgcgctttttggaacgcggatttggcagggcgaaggtgacatcgttgaagagtatctttcccgcgcgaggcataaagttgcgtgtgatgcggaagggtcccggcacctcggaacggttgttaattacctgggcggcgagcacgatctcgtcaaagccgttgatgttgtggcccacaatgtaaagttccaagaagcgcgggatgcccttgatggaaggcaattttttaagttcctcgtaggtgagctcttcaggggagctgagcccgtgctctgaaagggcccagtctgcaagatgagggttggaagcgacgaatgagctccacaggtcacgggccattagcatttgcaggtggtcgcgaaaggtcctaaactggcgacctatggccattttttctggggtgatgcagtagaaggtaagcgggtcttgttcccagcggtcccatccaaggttcgcggctaggtctcgcgcggcagtcactagaggctcatctccgccgaacttcatgaccagcatgaagggcacgagctgcttcccaaaggcccccatccaagtataggtctctacatcgtaggtgacaaagagacgctcggtgcgaggatgcgagccgatcgggaagaactggatctcccgccaccaattggaggagtggctattgatgtggtgaaagtagaagtccctgcgacgggccgaacactcgtgctggcttttgtaaaaacgtgcgcagtactggcagcggtgcacgggctgtacatcctgcacgaggttgacctgacgaccgcgcacaaggaagcagagtgggaatttgagcccctcgcctggcgggtttggctggtggtcttctacttcggctgcttgtccttgaccgtctggctgctcgaggggagttacggtggatcggaccaccacgccgcgcgagcccaaagtccagatgtccgcgcgcggcggtcggagcttgatgacaacatcgcgcagatgggagctgtccatggtctggagctcccgcggcgtcaggtcaggcgggagctcctgcaggtttacctcgcatagacgggtcagggcgcgggctagatccaggtgatacctaatttccaggggctggttggtggcggcgtcgatggcttgcaagaggccgcatccccgcggcgcgactacggtaccgcgcggcgggcggtgggccgcgggggtgtccttggatgatgcatctaaaagcggtgacgcgggcgagcccccggaggtagggggggctccggacccgccgggagagggggcaggggcacgtcggcgccgcgcgcgggcaggagctggtgctgcgcgcgtaggttgctggcgaacgcgacgacgcggcggttgatctcctgaatctggcgcctctgcgtgaagacgacgggcccggtgagcttgaacctgaaagagagttcgacagaatcaatttcggtgtcgttgacggcggcctggcgcaaaatctcctgcacgtctcctgagttgtcttgataggcgatctcggccatgaactgctcgatctcttcctcctggagatctccgcgtccggctcgctccacggtggcggcgaggtcgttggaaatgcgggccatgagctgcgagaaggcgttgaggcctccctcgttccagacgcggctgtagaccacgcccccttcggcatcgcgggcgcgcatgaccacctgcgcgagattgagctccacgtgccgggcgaagacggcgtagtttcgcaggcgctgaaagaggtagttgagggtggtggcggtgtgttctgccacgaagaagtacataacccagcgtcgcaacgtggattcgttgatatcccccaaggcctcaaggcgctccatggcctcgtagaagtccacggcgaagttgaaaaactgggagttgcgcgccgacacggttaactcctcctccagaagacggatgagctcggcgacagtgtcgcgcacctcgcgctcaaaggctacaggggcctcttcttcttcttcaatctcctcttccataagggcctccccttcttcttcttctggcggcggtgggggaggggggacacggcggcgacgacggcgcaccgggaggcggtcgacaaagcgctcgatcatctccccgcggcgacggcgcatggtctcggtgacggcgcggccgttctcgcgggggcgcagttggaagacgccgcccgtcatgtcccggttatgggttggcggggggctgccatgcggcagggatacggcgctaacgatgcatctcaacaattgttgtgtaggtactccgccgccgagggacctgagcgagtccgcatcgaccggatcggaaaacctctcgagaaaggcgtctaaccagtcacagtcgcaaggtaggctgagcaccgtggcgggcggcagcgggcggcggtcggggttgtttctggcggaggtgctgctgatgatgtaattaaagtaggcggtcttgagacggcggatggtcgacagaagcaccatgtccttgggtccggcctgctgaatgcgcaggcggtcggccatgccccaggcttcgttttgacatcggcgcaggtctttgtagtagtcttgcatgagcctttctaccggcacttcttcttctccttcctcttgtcctgcatctcttgcatctatcgctgcggcggcggcggagtttggccgtaggtggcgccctcttcctcccatgcgtgtgaccccgaagcccctcatcggctgaagcagggctaggtcggcgacaacgcgctcggctaatatggcctgctgcacctgcgtgagggtagactggaagtcatccatgtccacaaagcggtggtatgcgcccgtgttgatggtgtaagtgcagttggccataacggaccagttaacggtctggtgacccggctgcgagagctcggtgtacctgagacgcgagtaagccctcgagtcaaatacgtagtcgttgcaagtccgcaccaggtactggtatcccaccaaaaagtgcggcggcggctggcggtagaggggccagcgtagggtggccggggctccgggggcgagatcttccaacataaggcgatgatatccgtagatgtacctggacatccaggtgatgccggcggcggtggtggaggcgcgcggaaagtcgcggacgcggttccagatgttgcgcagcggcaaaaagtgctccatggtcgggacgctctggccggtcaggcgcgcgcaatcgttgacgctctagcgtgcaaaaggagagcctgtaagcgggcactcttccgtggtctggtggataaattcgcaagggtatcatggcggacgaccggggttcgagccccgtatccggccgtccgccgtgatccatgcggttaccgcccgcgtgtcgaacccaggtgtgcgacgtcagacaacgggggagtgctccttttggcttccttccaggcgcggcggctgctgcgctagcttttttggccactggccgcgcgcagcgtaagcggttaggctggaaagcgaaagcattaagtggctcgctccctgtagccggagggttattttccaagggttgagtcgcgggacccccggttcgagtctcggaccggccggactgcggcgaacgggggtttgcctccccgtcatgcaagaccccgcttgcaaattcctccggaaacagggacgagccccttttttgcttttcccagatgcatccggtgctgcggcagatgcgcccccctcctcagcagcggcaagagcaagagcagcggcagacatgcagggcaccctcccctcctcctaccgcgtcaggaggggcgacatccgcggttgacgcggcagcagatggtgattacgaacccccgcggcgccgggcccggcactacctggacttggaggagggcgagggcctggcgcggctaggagcgccctctcctgagcggcacccaagggtgcagctgaagcgtgatacgcgtgaggcgtacgtgccgcggcagaacctgtttcgcgaccgcgagggagaggagcccgaggagatgcgggatcgaaagttccacgcagggcgcgagctgcggcatggcctgaatcgcgagcggttgctgcgcgaggaggactttgagcccgacgcgcgaaccgggattagtcccgcgcgcgcacacgtggcggccgccgacctggtaaccgcatacgagcagacggtgaaccaggagattaactttcaaaaaagctttaacaaccacgtgcgtacgcttgtggcgcgcgaggaggtggctataggactgatgcatctgtgggactttgtaagcgcgctggagcaaaacccaaatagcaagccgctcatggcgcagctgttccttatagtgcagcacagcagggacaacgaggcattcagggatgcgctgctaaacatagtagagcccgagggccgctggctgctcgatttgataaacatcctgcagagcatagtggtgcaggagcgcagcttgagcctggctgacaaggtggccgccatcaactattccatgcttagcctgggcaagttttacgcccgcaagatataccataccccttacgttcccatagacaaggaggtaaagatcgaggggttctacatgcgcatggcgctgaaggtgcttaccttgagcgacgacctgggcgtttatcgcaacgagcgcatccacaaggccgtgagcgtgagccggcggcgcgagctcagcgaccgcgagctgatgcacagcctgcaaagggccctggctggcacgggcagcggcgatagagaggccgagtcctactttgacgcgggcgctgacctgcgctgggccccaagccgacgcgccctggaggcagctggggccggacctgggctggcggtggcacccgcgcgcgctggcaacgtcggcggcgtggaggaatatgacgaggacgatgagtacgagccagaggacggcgagtactaagcggtgatgtttctgatcagatgatgcaagacgcaacggacccggcggtgcgggcggcgctgcagagccagccgtccggccttaactccacggacgactggcgccaggtcatggaccgcatcatgtcgctgactgcgcgcaatcctgacgcgttccggcagcagccgcaggccaaccggctctccgcaattctggaagcggtggtcccggcgcgcgcaaaccccacgcacgagaaggtgctggcgatcgtaaacgcgctggccgaaaacagggccatccggcccgacgaggccggcctggtctacgacgcgctgcttcagcgcgtggctcgttacaacagcggcaacgtgcagaccaacctggaccggctggtgggggatgtgcgcgaggccgtggcgcagcgtgagcgcgcgcagcagcagggcaacctgggctccatggttgcactaaacgccttcctgagtacacagcccgccaacgtgccgcggggacaggaggactacaccaactttgtgagcgcactgcggctaatggtgactgagacaccgcaaagtgaggtgtaccagtctgggccagactattttttccagaccagtagacaaggcctgcagaccgtaaacctgagccaggctttcaaaaacttgcaggggctgtggggggtgcgggctcccacaggcgaccgcgcgaccgtgtctagcttgctgacgcccaactcgcgcctgttgctgctgctaatagcgcccttcacggacagtggcagcgtgtcccgggacacatacctaggtcacttgctgacactgtaccgcgaggccataggtcaggcgcatgtggacgagcatactttccaggagattacaagtgtcagccgcgcgctggggcaggaggacacgggcagcctggaggcaaccctaaactacctgctgaccaaccggcggcagaagatcccctcgttgcacagtttaaacagcgaggaggagcgcattttgcgctacgtgcagcagagcgtgagccttaacctgatgcgcgacggggtaacgcccagcgtggcgctggacatgaccgcgcgcaacatggaaccgggcatgtatgcctcaaaccggccgtttatcaaccgcctaatggactacttgcatcgcgcggccgccgtgaaccccgagtatttcaccaatgccatcttgaacccgcactggctaccgccccctggtttctacaccgggggattcgaggtgcccgagggtaacgatggattcctctgggacgacatagacgacagcgtgttttccccgcaaccgcagaccctgctagagttgcaacagcgcgagcaggcagaggcggcgctgcgaaaggaaagcttccgcaggccaagcagcttgtccgatctaggcgctgcggccccgcggtcagatgctagtagcccatttccaagcttgatagggtctcttaccagcactcgcaccacccgcccgcgcctgctgggcgaggaggagtacctaaacaactcgctgctgcagccgcagcgcgaaaaaaacctgcctccggcatttcccaacaacgggatagagagcctagtggacaagatgagtagatggaagacgtacgcgcaggagcacagggacgtgccaggcccgcgcccgcccacccgtcgtcaaaggcacgaccgtcagcggggtctggtgtgggaggacgatgactcggcagacgacagcagcgtcctggatttgggagggagtggcaacccgtttgcgcaccttcgccccaggctggggagaatgttttaaaaaaaaaaaagcatgatgcaaaataaaaaactcaccaaggccatggcaccgagcgttggttttcttgtattccccttagtatgcggcgcgcggcgatgtatgaggaaggtcctcctccctcctacgagagtgtggtgagcgcggcgccagtggcggcggcgctgggttctcccttcgatgctcccctggacccgccgtttgtgcctccgcggtacctgcggcctaccggggggagaaacagcatccgttactctgagttggcacccctattcgacaccacccgtgtgtacctggtggacaacaagtcaacggatgtggcatccctgaactaccagaacgaccacagcaactttctgaccacggtcattcaaaacaatgactacagcccgggggaggcaagcacacagaccatcaatcttgacgaccggtcgcactggggcggcgacctgaaaaccatcctgcataccaacatgccaaatgtgaacgagttcatgtttaccaataagtttaaggcgcgggtgatggtgtcgcgcttgcctactaaggacaatcaggtggagctgaaatacgagtgggtggagttcacgctgcccgagggcaactactccgagaccatgaccatagaccttatgaacaacgcgatcgtggagcactacttgaaagtgggcagacagaacggggttctggaaagcgacatcggggtaaagtttgacacccgcaacttcagactggggtttgaccccgtcactggtcttgtcatgcctggggtatatacaaacgaagccttccatccagacatcattttgctgccaggatgcggggtggacttcacccacagccgcctgagcaacttgttgggcatccgcaagcggcaacccttccaggagggctttaggatcacctacgatgatctggagggtggtaacattcccgcactgttggatgtggacgcctaccaggcgagcttgaaagatgacaccgaacagggcgggggtggcgcaggcggcagcaacagcagtggcagcggcgcggaagagaactccaacgcggcagccgcggcaatgcagccggtggaggacatgaacgatcatgccattcgcggcgacacctttgccacacgggctgaggagaagcgcgctgaggccgaagcagcggccgaagctgccgcccccgctgcgcaacccgaggtcgagaagcctcagaagaaaccggtgatcaaacccctgacagaggacagcaagaaacgcagttacaacctaataagcaatgacagcaccttcacccagtaccgcagctggtaccttgcatacaactacggcgaccctcagaccggaatccgctcatggaccctgctttgcactcctgacgtaacctgcggctcggagcaggtctactggtcgttgccagacatgatgcaagaccccgtgaccttccgctccacgcgccagatcagcaactttccggtggtgggcgccgagctgttgcccgtgcactccaagagcttctacaacgaccaggccgtctactcccaactcatccgccagtttacctctctgacccacgtgttcaatcgctttcccgagaaccagattttggcgcgcccgccagcccccaccatcaccaccgtcagtgaaaacgttcctgctctcacagatcacgggacgctaccgctgcgcaacagcatcggaggagtccagcgagtgaccattactgacgccagacgccgcacctgcccctacgtttacaaggccctgggcatagtctcgccgcgcgtcctatcgagccgcactttttgagcaagcatgtccatccttatatcgcccagcaataacacaggctggggcctgcgcttcccaagcaagatgtttggcggggccaagaagcgctccgaccaacacccagtgcgcgtgcgcgggcactaccgcgcgccctggggcgcgcacaaacgcggccgcactgggcgcaccaccgtcgatgacgccatcgacgcggtggtggaggaggcgcgcaactacacgcccacgccgccaccagtgtccacagtggacgcggccattcagaccgtggtgcgcggagcccggcgctatgctaaaatgaagagacggcggaggcgcgtagcacgtcgccaccgccgccgacccggcactgccgcccaacgcgcggcggcggccctgcttaaccgcgcacgtcgcaccggccgacgggcggccatgcgggccgctcgaaggctggccgcgggtattgtcactgtgccccccaggtccaggcgacgagcggccgccgcagcagccgcggccattagtgctatgactcagggtcgcaggggcaacgtgtattgggtgcgcgactcggttagcggcctgcgcgtgcccgtgcgcacccgccccccgcgcaactagattgcaagaaaaaactacttagactcgtactgttgtatgtatccagcggcggcggcgcgcaacgaagctatgtccaagcgcaaaatcaaagaagagatgctccaggtcatcgcgccggagatctatggccccccgaagaaggaagagcaggattacaagccccgaaagctaaagcgggtcaaaaagaaaaagaaagatgatgatgatgaacttgacgacgaggtggaactgctgcacgctaccgcgcccaggcgacgggtacagtggaaaggtcgacgcgtaaaacgtgttttgcgacccggcaccaccgtagtctttacgcccggtgagcgctccacccgcacctacaagcgcgtgtatgatgaggtgtacggcgacgaggacctgcttgagcaggccaacgagcgcctcggggagtttgcctacggaaagcggcataaggacatgctggcgttgccgctggacgagggcaacccaacacctagcctaaagcccgtaacactgcagcaggtgctgcccgcgcttgcaccgtccgaagaaaagcgcggcctaaagcgcgagtctggtgacttggcacccaccgtgcagctgatggtacccaagcgccagcgactggaagatgtcttggaaaaaatgaccgtggaacctgggctggagcccgaggtccgcgtgcggccaatcaagcaggtggcgccgggactgggcgtgcagaccgtggacgttcagatacccactaccagtagcaccagtattgccaccgccacagagggcatggagacacaaacgtccccggttgcctcagcggtggcggatgccgcggtgcaggcggtcgctgcggccgcgtccaagacctctacggaggtgcaaacggacccgtggatgtttcgcgtttcagccccccggcgcccgcgccgttcgaggaagtacggcgccgccagcgcgctactgcccgaatatgccctacatccttccattgcgcctacccccggctatcgtggctacacctaccgccccagaagacgagcaactacccgacgccgaaccaccactggaacccgccgccgccgtcgccgtcgccagcccgtgctggccccgatttccgtgcgcagggtggctcgcgaaggaggcaggaccctggtgctgccaacagcgcgctaccaccccagcatcgtttaaaagccggtctttgtggttcttgcagatatggccctcacctgccgcctccgtttcccggtgccgggattccgaggaagaatgcaccgtaggaggggcatggccggccacggcctgacgggcggcatgcgtcgtgcgcaccaccggcggcggcgcgcgtcgcaccgtcgcatgcgcggcggtatcctgcccctccttattccactgatcgccgcggcgattggcgccgtgcccggaattgcatccgtggccttgcaggcgcagagacactgattaaaaacaagttgcatgtggaaaaatcaaaataaaaagtctggactctcacgctcgcttggtcctgtaactattttgtagaatggaagacatcaactttgcgtctctggccccgcgacacggctcgcgcccgttcatgggaaactggcaagatatcggcaccagcaatatgagcggtggcgccttcagctggggctcgctgtggagcggcattaaaaatttcggttccaccgttaagaactatggcagcaaggcctggaacagcagcacaggccagatgctgagggataagttgaaagagcaaaatttccaacaaaaggtggtagatggcctggcctctggcattagcggggtggtggacctggccaaccaggcagtgcaaaataagattaacagtaagcttgatccccgccctcccgtagaggagcctccaccggccgtggagacagtgtctccagaggggcgtggcgaaaagcgtccgcgccccgacagggaagaaactctggtgacgcaaatagacgagcctccctcgtacgaggaggcactaaagcaaggcctgcccaccacccgtcccatcgcgcccatggctaccggagtgctgggccagcacacacccgtaacgctggacctgcctccccccgccgacacccagcagaaacctgtgctgccaggcccgaccgccgttgttgtaacccgtcctagccgcgcgtccctgcgccgcgccgccagcggtccgcgatcgttgcggcccgtagccagtggcaactggcaaagcacactgaacagcatcgtgggtctgggggtgcaatccctgaagcgccgacgatgcttctgatagctaacgtgtcgtatgtgtgtcatgtatgcgtccatgtcgccgccagaggagctgctgagccgccgcgcgcccgctttccaagatggctaccccttcgatgatgccgcagtggtcttacatgcacatctcgggccaggacgcctcggagtacctgagccccgggctggtgcagtttgcccgcgccaccgagacgtacttcagcctgaataacaagtttagaaaccccacggtggcgcctacgcacgacgtgaccacagaccggtcccagcgtttgacgctgcggttcatccctgtggaccgtgaggatactgcgtactcgtacaaggcgcggttcaccctagctgtgggtgataaccgtgtgctggacatggcttccacgtactttgacatccgcggcgtgctggacaggggccctacttttaagccctactctggcactgcctacaacgccctggctcccaagggtgccccaaatccttgcgaatgggatgaagctgctactgctcttgaaataaacctagaagaagaggacgatgacaacgaagacgaagtagacgagcaagctgagcagcaaaaaactcacgtatttgggcaggcgccttattctggtataaatattacaaaggagggtattcaaataggtgtcgaaggtcaaacacctaaatatgccgataaaacatttcaacctgaacctcaaataggagaatctcagtggtacgaaacagaaattaatcatgcagctgggagagtcctaaaaaagactaccccaatgaaaccatgttacggttcatatgcaaaacccacaaatgaaaatggagggcaaggcattcttgtaaagcaacaaaatggaaagctagaaagtcaagtggaaatgcaatttttctcaactactgaggcagccgcaggcaatggtgataacttgactcctaaagtggtattgtacagtgaagatgtagatatagaaaccccagacactcatatttcttacatgcccactattaaggaaggtaactcacgagaactaatgggccaacaatctatgcccaacaggcctaattacattgcttttagggacaattttattggtctaatgtattacaacagcacgggtaatatgggtgttctggcgggccaagcatcgcagttgaatgctgttgtagatttgcaagacagaaacacagagctttcataccagcttttgcttgattccattggtgatagaaccaggtacttttctatgtggaatcaggctgttgacagctatgatccagatgttagaattattgaaaatcatggaactgaagatgaacttccaaattactgctttccactgggaggtgtgattaatacagagactcttaccaaggtaaaacctaaaacaggtcaggaaaatggatgggaaaaagatgctacagaattttcagataaaaatgaaataagagttggaaataattttgccatggaaatcaatctaaatgccaacctgtggagaaatttcctgtactccaacatagcgctgtatttgcccgacaagctaaagtacagtccttccaacgtaaaaatttctgataacccaaacacctacgactacatgaacaagcgagtggtggctcccgggctagtggactgctacattaaccttggagcacgctggtcccttgactatatggacaacgtcaacccatttaaccaccaccgcaatgctggcctgcgctaccgctcaatgttgctgggcaatggtcgctatgtgcccttccacatccaggtgcctcagaagttctttgccattaaaaacctccttctcctgccgggctcatacacctacgagtggaacttcaggaaggatgttaacatggttctgcagagctccctaggaaatgacctaagggttgacggagccagcattaagtttgatagcatttgcctttacgccaccttcttccccatggcccacaacaccgcctccacgcttgaggccatgcttagaaacgacaccaacgaccagtcctttaacgactatctctccgccgccaacatgctctaccctatacccgccaacgctaccaacgtgcccatatccatcccctcccgcaactgggcggctttccgcggctgggccttcacgcgccttaagactaaggaaaccccatcactgggctcgggctacgacccttattacacctactctggctctataccctacctagatggaaccttttacctcaaccacacctttaagaaggtggccattacctttgactcttctgtcagctggcctggcaatgaccgcctgcttacccccaacgagtttgaaattaagcgctcagttgacggggagggttacaacgttgcccagtgtaacatgaccaaagactggttcctggtacaaatgctagctaactataacattggctaccagggcttctatatcccagagagctacaaggaccgcatgtactccttctttagaaacttccagcccatgagccgtcaggtggtggatgatactaaatacaaggactaccaacaggtgggcatcctacaccaacacaacaactctggatttgttggctaccttgcccccaccatgcgcgaaggacaggcctaccctgctaacttcccctatccgcttataggcaagaccgcagttgacagcattacccagaaaaagtttctttgcgatcgcaccctttggcgcatcccattctccagtaactttatgtccatgggcgcactcacagacctgggccaaaaccttctctacgccaactccgcccacgcgctagacatgacttttgaggtggatcccatggacgagcccacccttctttatgttttgtttgaagtctttgacgtggtccgtgtgcaccagccgcaccgcggcgtcatcgaaaccgtgtacctgcgcacgcccttctcggccggcaacgccacaacataaagaagcaagcaacatcaacaacagctgccgccatgggctccagtgagcaggaactgaaagccattgtcaaagatcttggttgtgggccatattttttgggcacctatgacaagcgctttccaggctttgtttctccacacaagctcgcctgcgccatagtcaatacggccggtcgcgagactgggggcgtacactggatggcctttgcctggaacccgcactcaaaaacatgctacctctttgagccctttggcttttctgaccagcgactcaagcaggtttaccagtttgagtacgagtcactcctgcgccgtagcgccattgcttcttcccccgaccgctgtataacgctggaaaagtccacccaaagcgtacaggggcccaactcggccgcctgtggactattctgctgcatgtttctccacgcctttgccaactggccccaaactcccatggatcacaaccccaccatgaaccttattaccggggtacccaactccatgctcaacagtccccaggtacagcccaccctgcgtcgcaaccaggaacagctctacagcttcctggagcgccactcgccctacttccgcagccacagtgcgcagattaggagcgccacttctttttgtcacttgaaaaacatgtaaaaataatgtactagagacactttcaataaaggcaaatgcttttatttgtacactctcgggtgattatttacccccacccttgccgtctgcgccgtttaaaaatcaaaggggttctgccgcgcatcgctatgcgccactggcagggacacgttgcgatactggtgtttagtgctccacttaaactcaggcacaaccatccgcggcagctcggtgaagttttcactccacaggctgcgcaccatcaccaacgcgtttagcaggtcgggcgccgatatcttgaagtcgcagttggggcctccgccctgcgcgcgcgagttgcgatacacagggttgcagcactggaacactatcagcgccgggtggtgcacgctggccagcacgctcttgtcggagatcagatccgcgtccaggtcctccgcgttgctcagggcgaacggagtcaactttggtagctgccttcccaaaaagggcgcgtgcccaggctttgagttgcactcgcaccgtagtggcatcaaaaggtgaccgtgcccggtctgggcgttaggatacagcgcctgcataaaagccttgatctgcttaaaagccacctgagcctttgcgccttcagagaagaacatgccgcaagacttgccggaaaactgattggccggacaggccgcgtcgtgcacgcagcaccttgcgtcggtgttggagatctgcaccacatttcggccccaccggttcttcacgatcttggccttgctagactgctccttcagcgcgcgctgcccgttttcgctcgtcacatccatttcaatcacgtgctccttatttatcataatgcttccgtgtagacacttaagctcgccttcgatctcagcgcagcggtgcagccacaacgcgcagcccgtgggctcgtgatgcttgtaggtcacctctgcaaacgactgcaggtacgcctgcaggaatcgccccatcatcgtcacaaaggtcttgttgctggtgaaggtcagctgcaacccgcggtgctcctcgttcagccaggtcttgcatacggccgccagagcttccacttggtcaggcagtagtttgaagttcgcctttagatcgttatccacgtggtacttgtccatcagcgcgcgcgcagcctccatgcccttctcccacgcagacacgatcggcacactcagcgggttcatcaccgtaatttcactttccgcttcgctgggctcttcctcttcctcttgcgtccgcataccacgcgccactgggtcgtcttcattcagccgccgcactgtgcgcttacctcctttgccatgcttgattagcaccggtgggttgctgaaacccaccatttgtagcgccacatcttctctttcttcctcgctgtccacgattacctctggtgatggcgggcgctcgggcttgggagaagggcgcttctttttcttcttgggcgcaatggccaaatccgccgccgaggtcgatggccgcgggctgggtgtgcgcggcaccagcgcgtcttgtgatgagtcttcctcgtcctcggactcgatacgccgcctcatccgcttttttgggggcgcccggggaggcggcggcgacggggacggggacgacacgtcctccatggttgggggacgtcgcgccgcaccgcgtccgcgctcgggggtggtttcgcgctgctcctcttcccgactggccatttccttctcctataggcagaaaaagatcatggagtcagtcgagaagaaggacagcctaaccgccccctctgagttcgccaccaccgcctccaccgatgccgccaacgcgcctaccaccttccccgtcgaggcacccccgcttgaggaggaggaagtgattatcgagcaggacccaggttttgtaagcgaagacgacgaggaccgctcagtaccaacagaggataaaaagcaagaccaggacaacgcagaggcaaacgaggaacaagtcgggcggggggacgaaaggcatggcgactacctagatgtgggagacgacgtgctgttgaagcatctgcagcgccagtgcgccattatctgcgacgcgttgcaagagcgcagcgatgtgcccctcgccatagcggatgtcagccttgcctacgaacgccacctattctcaccgcgcgtaccccccaaacgccaagaaaacggcacatgcgagcccaacccgcgcctcaacttctaccccgtatttgccgtgccagaggtgcttgccacctatcacatctttttccaaaactgcaagatacccctatcctgccgtgccaaccgcagccgagcggacaagcagctggccttgcggcagggcgctgtcatacctgatatcgcctcgctcaacgaagtgccaaaaatctttgagggtcttggacgcgacgagaagcgcgcggcaaacgctctgcaacaggaaaacagcgaaaatgaaagtcactctggagtgttggtggaactcgagggtgacaacgcgcgcctagccgtactaaaacgcagcatcgaggtcacccactttgcctacccggcacttaacctaccccccaaggtcatgagcacagtcatgagtgagctgatcgtgcgccgtgcgcagcccctggagagggatgcaaatttgcaagaacaaacagaggagggcctacccgcagttggcgacgagcagctagcgcgctggcttcaaacgcgcgagcctgccgacttggaggagcgacgcaaactaatgatggccgcagtgctcgttaccgtggagcttgagtgcatgcagcggttctttgctgacccggagatgcagcgcaagctagaggaaacattgcactacacctttcgacagggctacgtacgccaggcctgcaagatctccaacgtggagctctgcaacctggtctcctaccttggaattttgcacgaaaaccgccttgggcaaaacgtgcttcattccacgctcaagggcgaggcgcgccgcgactacgtccgcgactgcgtttacttatttctatgctacacctggcagacggccatgggcgtttggcagcagtgcttggaggagtgcaacctcaaggagctgcagaaactgctaaagcaaaacttgaaggacctatggacggccttcaacgagcgctccgtggccgcgcacctggcggacatcattttccccgaacgcctgcttaaaaccctgcaacagggtctgccagacttcaccagtcaaagcatgttgcagaactttaggaactttatcctagagcgctcaggaatcttgcccgccacctgctgtgcacttcctagcgactttgtgcccattaagtaccgcgaatgccctccgccgctttggggccactgctaccttctgcagctagccaactaccttgcctaccactctgacataatggaagacgtgagcggtgacggtctactggagtgtcactgtcgctgcaacctatgcaccccgcaccgctccctggtttgcaattcgcagctgcttaacgaaagtcaaattatcggtacctttgagctgcagggtccctcgcctgacgaaaagtccgcggctccggggttgaaactcactccggggctgtggacgtcggcttaccttcgcaaatttgtacctgaggactaccacgcccacgagattaggttctacgaagaccaatcccgcccgcctaatgcggagcttaccgcctgcgtcattacccagggccacattcttggccaattgcaagccatcaacaaagcccgccaagagtttctgctacgaaagggacggggggtttacttggacccccagtccggcgaggagctcaacccaatccccccgccgccgcagccctatcagcagcagccgcgggcccttgcttcccaggatggcacccaaaaagaagctgcagctgccgccgccacccacggacgaggaggaatactgggacagtcaggcagaggaggttttggacgaggaggaggaggacatgatggaagactgggagagcctagacgaggaagcttccgaggtcgaagaggtgtcagacgaaacaccgtcaccctcggtcgcattcccctcgccggcgccccagaaatcggcaaccggttccagcatggctacaacctccgctcctcaggcgccgccggcactgcccgttcgccgacccaaccgtagatgggacaccactggaaccagggccggtaagtccaagcagccgccgccgttagcccaagagcaacaacagcgccaaggctaccgctcatggcgcgggcacaagaacgccatagttgcttgcttgcaagactgtgggggcaacatctccttcgcccgccgctttcttctctaccatcacggcgtggccttcccccgtaacatcctgcattactaccgtcatctctacagcccatactgcaccggcggcagcggcagcaacagcagcggccacacagaagcaaaggcgaccggatagcaagactctgacaaagcccaagaaatccacagcggcggcagcagcaggaggaggagcgctgcgtctggcgcccaacgaacccgtatcgacccgcgagcttagaaacaggatttttcccactctgtatgctatatttcaacagagcaggggccaagaacaagagctgaaaataaaaaacaggtctctgcgatccctcacccgcagctgcctgtatcacaaaagcgaagatcagcttcggcgcacgctggaagacgcggaggctctcttcagtaaatactgcgcgctgactcttaaggactagtttcgcgccctttctcaaatttaagcgcgaaaactacgtcatctccagcggccacacccggcgccagcacctgttgtcagcgccattatgagcaaggaaattcccacgccctacatgtggagttaccagccacaaatgggacttgcggctggagctgcccaagactactcaacccgaataaactacatgagcgcgggaccccacatgatatcccgggtcaacggaatacgcgcccaccgaaaccgaattctcctggaacaggcggctattaccaccacacctcgtaataaccttaatccccgtagttggcccgctgccctggtgtaccaggaaagtcccgctcccaccactgtggtacttcccagagacgcccaggccgaagttcagatgactaactcaggggcgcagcttgcgggcggctttcgtcacagggtgcggtcgcccgggcagggtataactcacctgacaatcagagggcgaggtattcagctcaacgacgagtcggtgagctcctcgcttggtctccgtccggacgggacatttcagatcggcggcgccggccgctcttcattcacgcctcgtcaggcaatcctaactctgcagacctcgtcctctgagccgcgctctggaggcattggaactctgcaatttattgaggagtttgtgccatcggtctactttaaccccttctcgggacctcccggccactatccggatcaatttattcctaactttgacgcggtaaaggactcggcggacggctacgactgaatgttaagtggagaggcagagcaactgcgcctgaaacacctggtccactgtcgccgccacaagtgctttgcccgcgactccggtgagttttgctactttgaattgcccgaggatcatatcgagggcccggcgcacggcgtccggcttaccgcccagggagagcttgcccgtagcctgattcgggagtttacccagcgccccctgctagttgagcgggacaggggaccctgtgttctcactgtgatttgcaactgtcctaaccctggattacatcaagatcctctagttaatgtcaggtcgcctaagtcgattaactagagtacccggggatcttattccctttaactaataaaaaaaaataataaagcatcacttacttaaaatcagttagcaaatttctgtccagtttattcagcagcacctccttgccctcctcccagctctggtattgcagcttcctcctggctgcaaactttctccacaatctaaatggaatgtcagtttcctcctgttcctgtccatccgcacccactatcttcatgttgttgcagatgaagcgcgcaagaccgtctgaagataccttcaaccccgtgtatccatatgacacggaaaccggtcctccaactgtgccttttcttactcctccctttgtatcccccaatgggtttcaagagagtccccctggggtactctctttgcgcctatccgaacctctagttacctccaatggcatgcttgcgctcaaaatgggcaacggcctctctctggacgaggccggcaaccttacctcccaaaatgtaaccactgtgagcccacctctcaaaaaaaccaagtcaaacataaacctggaaatatctgcacccctcacagttacctcagaagccctaactgtggctgccgccgcacctctaatggtcgcgggcaacacactcaccatgcaatcacaggccccgctaaccgtgcacgactccaaacttagcattgccacccaaggacccctcacagtgtcagaaggaaagctagccctgcaaacatcaggccccctcaccaccaccgatagcagtacccttactatcactgcctcaccccctctaactactgccactggtagcttgggcattgacttgaaagagcccatttatacacaaaatggaaaactaggactaaagtacggggctcctttgcatgtaacagacgacctaaacactttgaccgtagcaactggtccaggtgtgactattaataatacttccttgcaaactaaagttactggagccttgggttttgattcacaaggcaatatgcaacttaatgtagcaggaggactaaggattgattctcaaaacagacgccttatacttgatgttagttatccgtttgatgctcaaaaccaactaaatctaagactaggacagggccctctttttataaactcagcccacaacttggatattaactacaacaaaggcctttacttgtttacagcttcaaacaattccaaaaagcttgaggttaacctaagcactgccaaggggttgatgtttgacgctacagccatagccattaatgcaggagatgggcttgaatttggttcacctaatgcaccaaacacaaatcccctcaaaacaaaaattggccatggcctagaatttgattcaaacaaggctatggttcctaaactaggaactggccttagttttgacagcacaggtgccattacagtaggaaacaaaaataatgataagctaactttgtggaccggaataaaccctccacctaactgtcaaattgtggaaaacactaatacaaatgatggcaaacttactttagtattagtaaaaaatggagggcttgttaatggctacgtgtctctagttggtgtatcagacactgtgaaccaaatgttcacacaaaagacagcaaacatccaattaagattatattttgactcttctggaaatctattaactgaggaatcagacttaaaaattccacttaaaaataaatcttctacagcgaccagtgaaactgtagccagcagcaaagcctttatgccaagtactacagcttatcccttcaacaccactactagggatagtgaaaactacattcatggaatatgttactacatgactagttatgatagaagtctatttcccttgaacatttctataatgctaaacagccgtatgatttcttccaatgttgcctatgccatacaatttgaatggaatctaaatgcaagtgaatctccagaaagcaacatagctacgctgaccacatccccctttttcttttcttacattacagaagacgacaactaaagaatcgtttgtgttatgtttcaacgtgtttatttttcaattgcagaaaatttcaagtcatttttcattcagtagtatagccccaccaccacatagcttatacagatcaccgtaccttaatcaaactcacagaaccctagtattcaacctgccacctccctcccaacacacagagtacacagtcctttctccccggctggccttaaaaagcatcatatcatgggtaacagacatattcttaggtgttatattccacacggtttcctgtcgagccaaacgctcatcagtgatattaataaactccccgggcagctcacttaagttcatgtcgctgtccagctgctgagccacaggctgctgtccaacttgcggttgcttaacgggcggcgaaggagaagtccacgcctacatgggggtagagtcataatcgtgcatcaggatagggcggtggtgctgcagcagcgcgcgaataaactgctgccgccgccgctccgtcctgcaggaatacaacatggcagtggtctcctcagcgatgattcgcaccgcccgcagcataaggcgccttgtcctccgggcacagcagcgcaccctgatctcacttaaatcagcacagtaactgcagcacagcaccacaatattgttcaaaatcccacagtgcaaggcgctgtatccaaagctcatggcggggaccacagaacccacgtggccatcataccacaagcgcaggtagattaagtggcgacccctcataaacacgctggacataaacattacctcttttggcatgttgtaattcaccacctcccggtaccatataaacctctgattaaacatggcgccatccaccaccatcctaaaccagctggccaaaacctgcccgccggctatacactgcagggaaccgggactggaacaatgacagtggagagcccaggactcgtaaccatggatcatcatgctcgtcatgatatcaatgttggcacaacacaggcacacgtgcatacacttcctcaggattacaagctcctcccgcgttagaaccatatcccagggaacaacccattcctgaatcagcgtaaatcccacactgcagggaagacctcgcacgtaactcacgttgtgcattgtcaaagtgttacattcgggcagcagcggatgatcctccagtatggtagcgcgggtttctgtctcaaaaggaggtagacgatccctactgtacggagtgcgccgagacaaccgagatcgtgttggtcgtagtgtcatgccaaatggaacgccggacgtagtcatatttcctgaagcaaaaccaggtgcgggcgtgacaaacagatctgcgtctccggtctcgccgcttagatcgctctgtgtagtagttgtagtatatccactctctcaaagcatccaggcgccccctggcttcgggttctatgtaaactccttcatgcgccgctgccctgataacatccaccaccgcagaataagccacacccagccaacctacacattcgttctgcgagtcacacacgggaggagcgggaagagctggaagaaccatgtttttttttttattccaaaagattatccaaaacctcaaaatgaagatctattaagtgaacgcgctcccctccggtggcgtggtcaaactctacagccaaagaacagataatggcatttgtaagatgttgcacaatggcttccaaaaggcaaacggccctcacgtccaagtggacgtaaaggctaaacccttcagggtgaatctcctctataaacattccagcaccttcaaccatgcccaaataattctcatctcgccaccttctcaatatatctctaagcaaatcccgaatattaagtccggccattgtaaaaatctgctccagagcgccctccaccttcagcctcaagcagcgaatcatgattgcaaaaattcaggttcctcacagacctgtataagattcaaaagcggaacattaacaaaaataccgcgatcccgtaggtcccttcgcagggccagctgaacataatcgtgcaggtctgcacggaccagcgcggccacttccccgccaggaaccatgacaaaagaacccacactgattatgacacgcatactcggagctatgctaaccagcgtagccccgatgtaagcttgttgcatgggcggcgatataaaatgcaaggtgctgctcaaaaaatcaggcaaagcctcgcgcaaaaaagaaagcacatcgtagtcatgctcatgcagataaaggcaggtaagctccggaaccaccacagaaaaagacaccatttttctctcaaacatgtctgcgggtttctgcataaacacaaaataaaataacaaaaaaacatttaaacattagaagcctgtcttacaacaggaaaaacaacccttataagcataagacggactacggccatgccggcgtgaccgtaaaaaaactggtcaccgtgattaaaaagcaccaccgacagctcctcggtcatgtccggagtcataatgtaagactcggtaaacacatcaggttgattcacatcggtcagtgctaaaaagcgaccgaaatagcccgggggaatacatacccgcaggcgtagagacaacattacagcccccataggaggtataacaaaattaataggagagaaaaacacataaacacctgaaaaaccctcctgcctaggcaaaatagcaccctcccgctccagaacaacatacagcgcttccacagcggcagccataacagtcagccttaccagtaaaaaagaaaacctattaaaaaaacaccactcgacacggcaccagctcaatcagtcacagtgtaaaaaagggccaagtgcagagcgagtatatataggactaaaaaatgacgtaacggttaaagtccacaaaaaacacccagaaaaccgcacgcgaacctacgcccagaaacgaaagccaaaaaacccacaacttcctcaaatcgtcacttccgttttcccacgttacgtcacttcccattttaagaaaactacaattcccaacacatacaagttactccgccctaaaacctacgtcacccgccccgttcccacgccccgcgccacgtcacaaactccaccccctcattatcatattggcttcaatccaaaataaggtatattattgatgatg

SEQ ID NO: 2 - DNA, 36248 bp, Artificial Sequence
  pRCA-E4dl355
ttaattaagaattaattcgatcctgaatggcgaatggacgcgccctgtagcggcgcattaagcgcggcgggtgtggtggttacgcgcagcgtgaccgctacacttgccagcgccctagcgcccgctcctttcgctttcttcccttcctttctcgccacgttcgccggctttccccgtcaagctctaaatcgggggctccctttagggttccgatttagtgctttacggcacctcgaccccaaaaaacttgattagggtgatggttcacgtagtgggccatcgccctgatagacggtttttcgccctttgacgttggagtccacgttctttaatagtggactcttgttccaaactggaacaacactcaaccctatctcggtctattcttttgatttataagggattttgccgatttcggcctattggttaaaaaatgagctgatttaacaaaaattttaacaaaattcagaagaactcgtcaagaaggcgatagaaggcgatgcgctgcgaatcgggagcggcgataccgtaaagcacgaggaagcggtcagcccattcgccgccaagctcttcagcaatatcacgggtagccaacgctatgtcctgatagcggtccgccacacccagccggccacagtcgatgaatccagaaaagcggccattttccaccatgatattcggcaagcaggcatcgccatgggtcacgacgagatcctcgccgtcgggcatgctcgccttgagcctggcgaacagttcggctggcgcgagcccctgatgctcttcgtccagatcatcctgatcgacaagaccggcttccatccgagtacgtgctcgctcgatgcgatgtttcgcttggtggtcgaatgggcaggtagccggatcaagcgtatgcagccgccgcattgcatcagccatgatggatactttctcggcaggagcaaggtgagatgacaggagatcctgccccggcacttcgcccaatagcagccagtcccttcccgcttcagtgacaacgtcgagcacagctgcgcaaggaacgcccgtcgtggccagccacgatagccgcgctgcctcgtcttgcagttcattcagggcaccggacaggtcggtcttgacaaaaagaaccgggcgcccctgcgctgacagccggaacacggcggcatcagagcagccgattgtctgttgtgcccagtcatagccgaatagcctctccacccaagcggccggagaacctgcgtgcaatccatcttgttcaatcatgcgaaacgatcctcatcctgtctcttgatcagagcttgatcccctgcgccatcagatccttggcggcaagaaagccatccagtttactttgcagggcttcccaaccttaccagagggcgccccagctggcaattccggttcgcttgctgtccataaaaccgcccagtctagctatcgccatgtaagcccactgcaagctacctgctttctctttgcgcttgcgttttcccttgtccagatagcccagtagctgacattcatccggggtcagcaccgtttctgcggactggctttctacgtgaaaaggatctaggtgaagatcctttttgataatctcatggctgcagcaatggcaacaacgttgcgcaaactattaactggcgaactacttactctagcttcccggcaacaattaatagactggatggaggcggataaagttgcaggaccacttctgcgctcggcccttccggctggctggtttattgctgataaatctggagccggtgagcgtgggtctcgcggtatcattgcagcactggggccagatggtaagccctcccgtatcgtagttatctacacgacggggagtcaggcaactatggatgaacgaaatagacagatcgctgagataggtgcctcactgattaagcattggtaactgtcagaccaagtttactcatatatactttagattgatttaaaacttcatttttaatttaaaaggatctaggtgaagatcctttttgataatctcatgaccaaaatcccttaacgtgagttttcgttccactgagcgtcagaccccgtagaaaagatcaaaggatcttcttgagatcctttttttctgcgcgtaatctgctgcttgcaaacaaaaaaaccaccgctaccagcggtggtttgtttgccggatcaagagctaccaactctttttccgaaggtaactggcttcagcagagcgcagataccaaatactgtccttctagtgtagccgtagttaggccaccacttcaagaactctgtagcaccgcctacatacctcgctctgctaatcctgttaccagtggctgctgccagtggcgataagtcgtgtcttaccgggttggactcaagacgatagttaccggataaggcgcagcggtcgggctgaacggggggttcgtgcacacagcccagcttggagcgaacgacctacaccgaactgagatacctacagcgtgagctatgagaaagcgccacgcttcccgaagggagaaaggcggacaggtatccggtaagcggcagggtcggaacaggagagcgcacgagggagcttccagggggaaacgcctggtatctttatagtcctgtcgggtttcgccacctctgacttgagcgtcgatttttgtgatgctcgtcaggggggcggagcctatggaaaaacgccagcaacgcggcctttttacggttcctggccttttgctggccttttgctcacatgttctttcctgcgttatcccctgattctgtggataaccgtattaccgcctttgagtgagctgataccgctcgccgcagccgaacgaccgagcgcagcgagtcagtgagcgaggaagcggaagagcgcctgatgcggtattttctccttacgcatctgtgcggtatttcacaccgcatatggatccatgcatgttaattaacatcatcaataatataccttattttggattgaagccaatatgataatgagggggtggagtttgtgacgtggcgcggggcgtgggaacggggcgggtgacgtagtagtgtggcggaagtgtgatgttgcaagtgtggcggaacacatgtaagcgacggatgtggcaaaagtgacgtttttggtgtgcgccggtgtacacaggaagtgacaattttcgcgcggttttaggcggatgttgtagtaaatttgggcgtaaccgagtaagatttggccattttcgcgggaaaactgaataagaggaagtgaaatctgaataattttgtgttactcatagcgcgtaatatttgtctagggccgcggggactttgaccgtttacgtggagactcgcccaggtgtttttctcaggtgttttccgcgttccgggtcaaagttggcgttttattattatagtcagctgacgtgtagtgtatttatacccggtgagttcctcaagaggccactcttgagtgccagcgagtagagttttctcctccgagccgctccgacaccgggactgaaaatgagacatattatctgccacggaggtgttattaccgaagaaatggccgccagtcttttggaccagctgatcgaagaggtactggctgataatcttccacctcctagccattttgaaccacctacccttcacgaactgtatgatttagacgtgacggcccccgaagatcccaacgaggaggcggtttcgcagatttttcccgactctgtaatgttggcggtgcaggaagggattgacttactcacttttccgccggcgcccggttctccggagccgcctcacctttcccggcagcccgagcagccggagcagagagccttgggtccggtttctatgccaaaccttgtaccggaggtgatcgatcttacctgccacgaggctggctttccacccagtgacgacgaggatgaagagggtgaggagtttgtgttagattatgtggagcaccccgggcacggttgcaggtcttgtcattatcaccggaggaatacgggggacccagatattatgtgttcgctttgctatatgaggacctgtggcatgtttgtctacagtaagtgaaaattatgggcagtgggtgatagagtggtgggtttggtgtggtaattttttttttaatttttacagttttgtggtttaaagaattttgtattgtgatttttttaaaaggtcctgtgtctgaacctgagcctgagcccgagccagaaccggagcctgcaagacctacccgccgtcctaaaatggcgcctgctatcctgagacgcccgacatcacctgtgtctagagaatgcaatagtagtacggatagctgtgactccggtccttctaacacacctcctgagatacacccggtggtcccgctgtgccccattaaaccagttgccgtgagagttggtgggcgtcgccaggctgtggaatgtatcgaggacttgcttaacgagcctgggcaacctttggacttgagctgtaaacgccccaggccataaggtgtaaacctgtgattgcgtgtgtggttaacgcctttgtttgctgaatgagttgatgtaagtttaataaagggtgagataatgtttaacttgcatggcgtgttaaatggggcggggcttaaagggtatataatgcgccgtgggctaatcttggttacatctgacctcatggaggcttgggagtgtttggaagatttttctgctgtgcgtaacttgctggaacagagctctaacagtacctcttggttttggaggtttctgtggggctcatcccaggcaaagttagtctgcagaattaaggaggattacaagtgggaatttgaagagcttttgaaatcctgtggtgagctgtttgattctttgaatctgggtcaccaggcgcttttccaagagaaggtcatcaagactttggatttttccacaccggggcgcgctgcggctgctgttgcttttttgagttttataaaggataaatggagcgaagaaacccatctgagcggggggtacctgctggattttctggccatgcatctgtggagagcggttgtgagacacaagaatcgcctgctactgttgtcttccgtccgcccggcgataataccgacggaggagcagcagcagcagcaggaggaagccaggcggcggcggcaggagcagagcccatggaacccgagagccggcctggaccctcgggaatgaatgttgtacaggtggctgaactgtatccagaactgagacgcattttgacaattacagaggatgggcaggggctaaagggggtaaagagggagcggggggcttgtgaggctacagaggaggctaggaatctagcttttagcttaatgaccagacaccgtcctgagtgtattacttttcaacagatcaaggataattgcgctaatgagcttgatctgctggcgcagaagtattccatagagcagctgaccacttactggctgcagccaggggatgattttgaggaggctattagggtatatgcaaaggtggcacttaggccagattgcaagtacaagatcagcaaacttgtaaatatcaggaattgttgctacatttctgggaacggggccgaggtggagatagatacggaggatagggtggcctttagatgtagcatgataaatatgtggccgggggtgcttggcatggacggggtggttattatgaatgtaaggtttactggccccaattttagcggtacggttttcctggccaataccaaccttatcctacacggtgtaagcttctatgggtttaacaatacctgtgtggaagcctggaccgatgtaagggttcggggctgtgccttttactgctgctggaagggggtggtgtgtcgccccaaaagcagggcttcaattaagaaatgcctctttgaaaggtgtaccttgggtatcctgtctgagggtaactccagggtgcgccacaatgtggcctccgactgtggttgcttcatgctagtgaaaagcgtggctgtgattaagcataacatggtatgtggcaactgcgaggacagggcctctcagatgctgacctgctcggacggcaactgtcacctgctgaagaccattcacgtagccagccactctcgcaaggcctggccagtgtttgagcataacatactgacccgctgttccttgcatttgggtaacaggaggggggtgttcctaccttaccaatgcaatttgagtcacactaagatattgcttgagcccgagagcatgtccaaggtgaacctgaacggggtgtttgacatgaccatgaagatctggaaggtgctgaggtacgatgagacccgcaccaggtgcagaccctgcgagtgtggcggtaaacatattaggaaccagcctgtgatgctggatgtgaccgaggagctgaggcccgatcacttggtgctggcctgcacccgcgctgagtttggctctagcgatgaagatacagattgaggtactgaaatgtgtgggcgtggcttaagggtgggaaagaatatataaggtgggggtcttatgtagttttgtatctgttttgcagcagccgccgccgccatgagcaccaactcgtttgatggaagcattgtgagctcatatttgacaacgcgcatgcccccatgggccggggtgcgtcagaatgtgatgggctccagcattgatggtcgccccgtcctgcccgcaaactctactaccttgacctacgagaccgtgtctggaacgccgttggagactgcagcctccgccgccgcttcagccgctgcagccaccgcccgcgggattgtgactgactttgctttcctgagcccgcttgcaagcagtgcagcttcccgttcatccgcccgcgatgacaagttgacggctcttttggcacaattggattctttgacccgggaacttaatgtcgtttctcagcagctgttggatctgcgccagcaggtttctgccctgaaggcttcctcccctcccaatgcggtttaaaacataaataaaaaaccagactctgtttggatttggatcaagcaagtgtcttgctgtctttatttaggggttttgcgcgcgcggtaggcccgggaccagcggtctcggtcgttgagggtcctgtgtattttttccaggacgtggtaaaggtgactctggatgttcagatacatgggcataagcccgtctctggggtggaggtagcaccactgcagagcttcatgctgcggggtggtgttgtagatgatccagtcgtagcaggagcgctgggcgtggtgcctaaaaatgtctttcagtagcaagctgattgccaggggcaggcccttggtgtaagtgtttacaaagcggttaagctgggatgggtgcatacgtggggatatgagatgcatcttggactgtatttttaggttggctatgttcccagccatatccctccggggattcatgttgtgcagaaccaccagcacagtgtatccggtgcacttgggaaatttgtcatgtagcttagaaggaaatgcgtggaagaacttggagacgcccttgtgacctccaagattttccatgcattcgtccataatgatggcaatgggcccacgggcggcggcctgggcgaagatatttctgggatcactaacgtcatagttgtgttccaggatgagatcgtcataggccatttttacaaagcgcgggcggagggtgccagactgcggtataatggttccatccggcccaggggcgtagttaccctcacagatttgcatttcccacgctttgagttcagatggggggatcatgtctacctgcggggcgatgaagaaaacggtttccggggtaggggagatcagctgggaagaaagcaggttcctgagcagctgcgacttaccgcagccggtgggcccgtaaatcacacctattaccgggtgcaactggtagttaagagagctgcagctgccgtcatccctgagcaggggggccacttcgttaagcatgtccctgactcgcatgttttccctgaccaaatccgccagaaggcgctcgccgcccagcgatagcagttcttgcaaggaagcaaagtttttcaacggtttgagaccgtccgccgtaggcatgcttttgagcgtttgaccaagcagttccaggcggtcccacagctcggtcacctgctctacggcatctcgatccagcatatctcctcgtttcgcgggttggggcggctttcgctgtacggcagtagtcggtgctcgtccagacgggccagggtcatgtctttccacgggcgcagggtcctcgtcagcgtagtctgggtcacggtgaaggggtgcgctccgggctgcgcgctggccagggtgcgcttgaggctggtcctgctggtgctgaagcgctgccggtcttcgccctgcgcgtcggccaggtagcatttgaccatggtgtcatagtccagcccctccgcggcgtggcccttggcgcgcagcttgcccttggaggaggcgccgcacgaggggcagtgcagacttttgagggcgtagagcttgggcgcgagaaataccgattccggggagtaggcatccgcgccgcaggccccgcagacggtctcgcattccacgagccaggtgagctctggccgttcggggtcaaaaaccaggtttcccccatgctttttgatgcgtttcttacctctggtttccatgagccggtgtccacgctcggtgacgaaaaggctgtccgtgtccccgtatacagacttgagaggcctgtcctcgagcggtgttccgcggtcctcctcgtatagaaactcggaccactctgagacaaaggctcgcgtccaggccagcacgaaggaggctaagtgggaggggtagcggtcgttgtccactagggggtccactcgctccagggtgtgaagacacatgtcgccctcttcggcatcaaggaaggtgattggtttgtaggtgtaggccacgtgaccgggtgttcctgaaggggggctataaaagggggtgggggcgcgttcgtcctcactctcttccgcatcgctgtctgcgagggccagctgttggggtgagtactccctctgaaaagcgggcatgacttctgcgctaagattgtcagtttccaaaaacgaggaggatttgatattcacctggcccgcggtgatgcctttgagggtggccgcatccatctggtcagaaaagacaatctttttgttgtcaagcttggtggcaaacgacccgtagagggcgttggacagcaacttggcgatggagcgcagggtttggtttttgtcgcgatcggcgcgctccttggccgcgatgtttagctgcacgtattcgcgcgcaacgcaccgccattcgggaaagacggtggtgcgctcgtcgggcaccaggtgcacgcgccaaccgcggttgtgcagggtgacaaggtcaacgctggtggctacctctccgcgtaggcgctcgttggtccagcagaggcggccgcccttgcgcgagcagaatggcggtagggggtctagctgcgtctcgtccggggggtctgcgtccacggtaaagaccccgggcagcaggcgcgcgtcgaagtagtctatcttgcatccttgcaagtctagcgcctgctgccatgcgcgggcggcaagcgcgcgctcgtatgggttgagtgggggaccccatggcatggggtgggtgagcgcggaggcgtacatgccgcaaatgtcgtaaacgtagaggggctctctgagtattccaagatatgtagggtagcatcttccaccgcggatgctggcgcgcacgtaatcgtatagttcgtgcgagggagcgaggaggtcgggaccgaggttgctacgggcgggctgctctgctcggaagactatctgcctgaagatggcatgtgagttggatgatatggttggacgctggaagacgttgaagctggcgtctgtgagacctaccgcgtcacgcacgaaggaggcgtaggagtcgcgcagcttgttgaccagctcggcggtgacctgcacgtctagggcgcagtagtccagggtttccttgatgatgtcatacttatcctgtcccttttttttccacagctcgcggttgaggacaaactcttcgcggtctttccagtactcttggatcggaaacccgtcggcctccgaacggtaagagcctagcatgtagaactggttgacggcctggtaggcgcagcatcccttttctacgggtagcgcgtatgcctgcgcggccttccggagcgaggtgtgggtgagcgcaaaggtgtccctgaccatgactttgaggtactggtatttgaagtcagtgtcgtcgcatccgccctgctcccagagcaaaaagtccgtgcgctttttggaacgcggatttggcagggcgaaggtgacatcgttgaagagtatctttcccgcgcgaggcataaagttgcgtgtgatgcggaagggtcccggcacctcggaacggttgttaattacctgggcggcgagcacgatctcgtcaaagccgttgatgttgtggcccacaatgtaaagttccaagaagcgcgggatgcccttgatggaaggcaattttttaagttcctcgtaggtgagctcttcaggggagctgagcccgtgctctgaaagggcccagtctgcaagatgagggttggaagcgacgaatgagctccacaggtcacgggccattagcatttgcaggtggtcgcgaaaggtcctaaactggcgacctatggccattttttctggggtgatgcagtagaaggtaagcgggtcttgttcccagcggtcccatccaaggttcgcggctaggtctcgcgcggcagtcactagaggctcatctccgccgaacttcatgaccagcatgaagggcacgagctgcttcccaaaggcccccatccaagtataggtctctacatcgtaggtgacaaagagacgctcggtgcgaggatgcgagccgatcgggaagaactggatctcccgccaccaattggaggagtggctattgatgtggtgaaagtagaagtccctgcgacgggccgaacactcgtgctggcttttgtaaaaacgtgcgcagtactggcagcggtgcacgggctgtacatcctgcacgaggttgacctgacgaccgcgcacaaggaagcagagtgggaatttgagcccctcgcctggcgggtttggctggtggtcttctacttcggctgcttgtccttgaccgtctggctgctcgaggggagttacggtggatcggaccaccacgccgcgcgagcccaaagtccagatgtccgcgcgcggcggtcggagcttgatgacaacatcgcgcagatgggagctgtccatggtctggagctcccgcggcgtcaggtcaggcgggagctcctgcaggtttacctcgcatagacgggtcagggcgcgggctagatccaggtgatacctaatttccaggggctggttggtggcggcgtcgatggcttgcaagaggccgcatccccgcggcgcgactacggtaccgcgcggcgggcggtgggccgcgggggtgtccttggatgatgcatctaaaagcggtgacgcgggcgagcccccggaggtagggggggctccggacccgccgggagagggggcaggggcacgtcggcgccgcgcgcgggcaggagctggtgctgcgcgcgtaggttgctggcgaacgcgacgacgcggcggttgatctcctgaatctggcgcctctgcgtgaagacgacgggcccggtgagcttgaacctgaaagagagttcgacagaatcaatttcggtgtcgttgacggcggcctggcgcaaaatctcctgcacgtctcctgagttgtcttgataggcgatctcggccatgaactgctcgatctcttcctcctggagatctccgcgtccggctcgctccacggtggcggcgaggtcgttggaaatgcgggccatgagctgcgagaaggcgttgaggcctccctcgttccagacgcggctgtagaccacgcccccttcggcatcgcgggcgcgcatgaccacctgcgcgagattgagctccacgtgccgggcgaagacggcgtagtttcgcaggcgctgaaagaggtagttgagggtggtggcggtgtgttctgccacgaagaagtacataacccagcgtcgcaacgtggattcgttgatatcccccaaggcctcaaggcgctccatggcctcgtagaagtccacggcgaagttgaaaaactgggagttgcgcgccgacacggttaactcctcctccagaagacggatgagctcggcgacagtgtcgcgcacctcgcgctcaaaggctacaggggcctcttcttcttcttcaatctcctcttccataagggcctccccttcttcttcttctggcggcggtgggggaggggggacacggcggcgacgacggcgcaccgggaggcggtcgacaaagcgctcgatcatctccccgcggcgacggcgcatggtctcggtgacggcgcggccgttctcgcgggggcgcagttggaagacgccgcccgtcatgtcccggttatgggttggcggggggctgccatgcggcagggatacggcgctaacgatgcatctcaacaattgttgtgtaggtactccgccgccgagggacctgagcgagtccgcatcgaccggatcggaaaacctctcgagaaaggcgtctaaccagtcacagtcgcaaggtaggctgagcaccgtggcgggcggcagcgggcggcggtcggggttgtttctggcggaggtgctgctgatgatgtaattaaagtaggcggtcttgagacggcggatggtcgacagaagcaccatgtccttgggtccggcctgctgaatgcgcaggcggtcggccatgccccaggcttcgttttgacatcggcgcaggtctttgtagtagtcttgcatgagcctttctaccggcacttcttcttctccttcctcttgtcctgcatctcttgcatctatcgctgcggcggcggcggagtttggccgtaggtggcgccctcttcctcccatgcgtgtgaccccgaagcccctcatcggctgaagcagggctaggtcggcgacaacgcgctcggctaatatggcctgctgcacctgcgtgagggtagactggaagtcatccatgtccacaaagcggtggtatgcgcccgtgttgatggtgtaagtgcagttggccataacggaccagttaacggtctggtgacccggctgcgagagctcggtgtacctgagacgcgagtaagccctcgagtcaaatacgtagtcgttgcaagtccgcaccaggtactggtatcccaccaaaaagtgcggcggcggctggcggtagaggggccagcgtagggtggccggggctccgggggcgagatcttccaacataaggcgatgatatccgtagatgtacctggacatccaggtgatgccggcggcggtggtggaggcgcgcggaaagtcgcggacgcggttccagatgttgcgcagcggcaaaaagtgctccatggtcgggacgctctggccggtcaggcgcgcgcaatcgttgacgctctagcgtgcaaaaggagagcctgtaagcgggcactcttccgtggtctggtggataaattcgcaagggtatcatggcggacgaccggggttcgagccccgtatccggccgtccgccgtgatccatgcggttaccgcccgcgtgtcgaacccaggtgtgcgacgtcagacaacgggggagtgctccttttggcttccttccaggcgcggcggctgctgcgctagcttttttggccactggccgcgcgcagcgtaagcggttaggctggaaagcgaaagcattaagtggctcgctccctgtagccggagggttattttccaagggttgagtcgcgggacccccggttcgagtctcggaccggccggactgcggcgaacgggggtttgcctccccgtcatgcaagaccccgcttgcaaattcctccggaaacagggacgagccccttttttgcttttcccagatgcatccggtgctgcggcagatgcgcccccctcctcagcagcggcaagagcaagagcagcggcagacatgcagggcaccctcccctcctcctaccgcgtcaggaggggcgacatccgcggttgacgcggcagcagatggtgattacgaacccccgcggcgccgggcccggcactacctggacttggaggagggcgagggcctggcgcggctaggagcgccctctcctgagcggcacccaagggtgcagctgaagcgtgatacgcgtgaggcgtacgtgccgcggcagaacctgtttcgcgaccgcgagggagaggagcccgaggagatgcgggatcgaaagttccacgcagggcgcgagctgcggcatggcctgaatcgcgagcggttgctgcgcgaggaggactttgagcccgacgcgcgaaccgggattagtcccgcgcgcgcacacgtggcggccgccgacctggtaaccgcatacgagcagacggtgaaccaggagattaactttcaaaaaagctttaacaaccacgtgcgtacgcttgtggcgcgcgaggaggtggctataggactgatgcatctgtgggactttgtaagcgcgctggagcaaaacccaaatagcaagccgctcatggcgcagctgttccttatagtgcagcacagcagggacaacgaggcattcagggatgcgctgctaaacatagtagagcccgagggccgctggctgctcgatttgataaacatcctgcagagcatagtggtgcaggagcgcagcttgagcctggctgacaaggtggccgccatcaactattccatgcttagcctgggcaagttttacgcccgcaagatataccataccccttacgttcccatagacaaggaggtaaagatcgaggggttctacatgcgcatggcgctgaaggtgcttaccttgagcgacgacctgggcgtttatcgcaacgagcgcatccacaaggccgtgagcgtgagccggcggcgcgagctcagcgaccgcgagctgatgcacagcctgcaaagggccctggctggcacgggcagcggcgatagagaggccgagtcctactttgacgcgggcgctgacctgcgctgggccccaagccgacgcgccctggaggcagctggggccggacctgggctggcggtggcacccgcgcgcgctggcaacgtcggcggcgtggaggaatatgacgaggacgatgagtacgagccagaggacggcgagtactaagcggtgatgtttctgatcagatgatgcaagacgcaacggacccggcggtgcgggcggcgctgcagagccagccgtccggccttaactccacggacgactggcgccaggtcatggaccgcatcatgtcgctgactgcgcgcaatcctgacgcgttccggcagcagccgcaggccaaccggctctccgcaattctggaagcggtggtcccggcgcgcgcaaaccccacgcacgagaaggtgctggcgatcgtaaacgcgctggccgaaaacagggccatccggcccgacgaggccggcctggtctacgacgcgctgcttcagcgcgtggctcgttacaacagcggcaacgtgcagaccaacctggaccggctggtgggggatgtgcgcgaggccgtggcgcagcgtgagcgcgcgcagcagcagggcaacctgggctccatggttgcactaaacgccttcctgagtacacagcccgccaacgtgccgcggggacaggaggactacaccaactttgtgagcgcactgcggctaatggtgactgagacaccgcaaagtgaggtgtaccagtctgggccagactattttttccagaccagtagacaaggcctgcagaccgtaaacctgagccaggctttcaaaaacttgcaggggctgtggggggtgcgggctcccacaggcgaccgcgcgaccgtgtctagcttgctgacgcccaactcgcgcctgttgctgctgctaatagcgcccttcacggacagtggcagcgtgtcccgggacacatacctaggtcacttgctgacactgtaccgcgaggccataggtcaggcgcatgtggacgagcatactttccaggagattacaagtgtcagccgcgcgctggggcaggaggacacgggcagcctggaggcaaccctaaactacctgctgaccaaccggcggcagaagatcccctcgttgcacagtttaaacagcgaggaggagcgcattttgcgctacgtgcagcagagcgtgagccttaacctgatgcgcgacggggtaacgcccagcgtggcgctggacatgaccgcgcgcaacatggaaccgggcatgtatgcctcaaaccggccgtttatcaaccgcctaatggactacttgcatcgcgcggccgccgtgaaccccgagtatttcaccaatgccatcttgaacccgcactggctaccgccccctggtttctacaccgggggattcgaggtgcccgagggtaacgatggattcctctgggacgacatagacgacagcgtgttttccccgcaaccgcagaccctgctagagttgcaacagcgcgagcaggcagaggcggcgctgcgaaaggaaagcttccgcaggccaagcagcttgtccgatctaggcgctgcggccccgcggtcagatgctagtagcccatttccaagcttgatagggtctcttaccagcactcgcaccacccgcccgcgcctgctgggcgaggaggagtacctaaacaactcgctgctgcagccgcagcgcgaaaaaaacctgcctccggcatttcccaacaacgggatagagagcctagtggacaagatgagtagatggaagacgtacgcgcaggagcacagggacgtgccaggcccgcgcccgcccacccgtcgtcaaaggcacgaccgtcagcggggtctggtgtgggaggacgatgactcggcagacgacagcagcgtcctggatttgggagggagtggcaacccgtttgcgcaccttcgccccaggctggggagaatgttttaaaaaaaaaaaagcatgatgcaaaataaaaaactcaccaaggccatggcaccgagcgttggttttcttgtattccccttagtatgcggcgcgcggcgatgtatgaggaaggtcctcctccctcctacgagagtgtggtgagcgcggcgccagtggcggcggcgctgggttctcccttcgatgctcccctggacccgccgtttgtgcctccgcggtacctgcggcctaccggggggagaaacagcatccgttactctgagttggcacccctattcgacaccacccgtgtgtacctggtggacaacaagtcaacggatgtggcatccctgaactaccagaacgaccacagcaactttctgaccacggtcattcaaaacaatgactacagcccgggggaggcaagcacacagaccatcaatcttgacgaccggtcgcactggggcggcgacctgaaaaccatcctgcataccaacatgccaaatgtgaacgagttcatgtttaccaataagtttaaggcgcgggtgatggtgtcgcgcttgcctactaaggacaatcaggtggagctgaaatacgagtgggtggagttcacgctgcccgagggcaactactccgagaccatgaccatagaccttatgaacaacgcgatcgtggagcactacttgaaagtgggcagacagaacggggttctggaaagcgacatcggggtaaagtttgacacccgcaacttcagactggggtttgaccccgtcactggtcttgtcatgcctggggtatatacaaacgaagccttccatccagacatcattttgctgccaggatgcggggtggacttcacccacagccgcctgagcaacttgttgggcatccgcaagcggcaacccttccaggagggctttaggatcacctacgatgatctggagggtggtaacattcccgcactgttggatgtggacgcctaccaggcgagcttgaaagatgacaccgaacagggcgggggtggcgcaggcggcagcaacagcagtggcagcggcgcggaagagaactccaacgcggcagccgcggcaatgcagccggtggaggacatgaacgatcatgccattcgcggcgacacctttgccacacgggctgaggagaagcgcgctgaggccgaagcagcggccgaagctgccgcccccgctgcgcaacccgaggtcgagaagcctcagaagaaaccggtgatcaaacccctgacagaggacagcaagaaacgcagttacaacctaataagcaatgacagcaccttcacccagtaccgcagctggtaccttgcatacaactacggcgaccctcagaccggaatccgctcatggaccctgctttgcactcctgacgtaacctgcggctcggagcaggtctactggtcgttgccagacatgatgcaagaccccgtgaccttccgctccacgcgccagatcagcaactttccggtggtgggcgccgagctgttgcccgtgcactccaagagcttctacaacgaccaggccgtctactcccaactcatccgccagtttacctctctgacccacgtgttcaatcgctttcccgagaaccagattttggcgcgcccgccagcccccaccatcaccaccgtcagtgaaaacgttcctgctctcacagatcacgggacgctaccgctgcgcaacagcatcggaggagtccagcgagtgaccattactgacgccagacgccgcacctgcccctacgtttacaaggccctgggcatagtctcgccgcgcgtcctatcgagccgcactttttgagcaagcatgtccatccttatatcgcccagcaataacacaggctggggcctgcgcttcccaagcaagatgtttggcggggccaagaagcgctccgaccaacacccagtgcgcgtgcgcgggcactaccgcgcgccctggggcgcgcacaaacgcggccgcactgggcgcaccaccgtcgatgacgccatcgacgcggtggtggaggaggcgcgcaactacacgcccacgccgccaccagtgtccacagtggacgcggccattcagaccgtggtgcgcggagcccggcgctatgctaaaatgaagagacggcggaggcgcgtagcacgtcgccaccgccgccgacccggcactgccgcccaacgcgcggcggcggccctgcttaaccgcgcacgtcgcaccggccgacgggcggccatgcgggccgctcgaaggctggccgcgggtattgtcactgtgccccccaggtccaggcgacgagcggccgccgcagcagccgcggccattagtgctatgactcagggtcgcaggggcaacgtgtattgggtgcgcgactcggttagcggcctgcgcgtgcccgtgcgcacccgccccccgcgcaactagattgcaagaaaaaactacttagactcgtactgttgtatgtatccagcggcggcggcgcgcaacgaagctatgtccaagcgcaaaatcaaagaagagatgctccaggtcatcgcgccggagatctatggccccccgaagaaggaagagcaggattacaagccccgaaagctaaagcgggtcaaaaagaaaaagaaagatgatgatgatgaacttgacgacgaggtggaactgctgcacgctaccgcgcccaggcgacgggtacagtggaaaggtcgacgcgtaaaacgtgttttgcgacccggcaccaccgtagtctttacgcccggtgagcgctccacccgcacctacaagcgcgtgtatgatgaggtgtacggcgacgaggacctgcttgagcaggccaacgagcgcctcggggagtttgcctacggaaagcggcataaggacatgctggcgttgccgctggacgagggcaacccaacacctagcctaaagcccgtaacactgcagcaggtgctgcccgcgcttgcaccgtccgaagaaaagcgcggcctaaagcgcgagtctggtgacttggcacccaccgtgcagctgatggtacccaagcgccagcgactggaagatgtcttggaaaaaatgaccgtggaacctgggctggagcccgaggtccgcgtgcggccaatcaagcaggtggcgccgggactgggcgtgcagaccgtggacgttcagatacccactaccagtagcaccagtattgccaccgccacagagggcatggagacacaaacgtccccggttgcctcagcggtggcggatgccgcggtgcaggcggtcgctgcggccgcgtccaagacctctacggaggtgcaaacggacccgtggatgtttcgcgtttcagccccccggcgcccgcgccgttcgaggaagtacggcgccgccagcgcgctactgcccgaatatgccctacatccttccattgcgcctacccccggctatcgtggctacacctaccgccccagaagacgagcaactacccgacgccgaaccaccactggaacccgccgccgccgtcgccgtcgccagcccgtgctggccccgatttccgtgcgcagggtggctcgcgaaggaggcaggaccctggtgctgccaacagcgcgctaccaccccagcatcgtttaaaagccggtctttgtggttcttgcagatatggccctcacctgccgcctccgtttcccggtgccgggattccgaggaagaatgcaccgtaggaggggcatggccggccacggcctgacgggcggcatgcgtcgtgcgcaccaccggcggcggcgcgcgtcgcaccgtcgcatgcgcggcggtatcctgcccctccttattccactgatcgccgcggcgattggcgccgtgcccggaattgcatccgtggccttgcaggcgcagagacactgattaaaaacaagttgcatgtggaaaaatcaaaataaaaagtctggactctcacgctcgcttggtcctgtaactattttgtagaatggaagacatcaactttgcgtctctggccccgcgacacggctcgcgcccgttcatgggaaactggcaagatatcggcaccagcaatatgagcggtggcgccttcagctggggctcgctgtggagcggcattaaaaatttcggttccaccgttaagaactatggcagcaaggcctggaacagcagcacaggccagatgctgagggataagttgaaagagcaaaatttccaacaaaaggtggtagatggcctggcctctggcattagcggggtggtggacctggccaaccaggcagtgcaaaataagattaacagtaagcttgatccccgccctcccgtagaggagcctccaccggccgtggagacagtgtctccagaggggcgtggcgaaaagcgtccgcgccccgacagggaagaaactctggtgacgcaaatagacgagcctccctcgtacgaggaggcactaaagcaaggcctgcccaccacccgtcccatcgcgcccatggctaccggagtgctgggccagcacacacccgtaacgctggacctgcctccccccgccgacacccagcagaaacctgtgctgccaggcccgaccgccgttgttgtaacccgtcctagccgcgcgtccctgcgccgcgccgccagcggtccgcgatcgttgcggcccgtagccagtggcaactggcaaagcacactgaacagcatcgtgggtctgggggtgcaatccctgaagcgccgacgatgcttctgatagctaacgtgtcgtatgtgtgtcatgtatgcgtccatgtcgccgccagaggagctgctgagccgccgcgcgcccgctttccaagatggctaccccttcgatgatgccgcagtggtcttacatgcacatctcgggccaggacgcctcggagtacctgagccccgggctggtgcagtttgcccgcgccaccgagacgtacttcagcctgaataacaagtttagaaaccccacggtggcgcctacgcacgacgtgaccacagaccggtcccagcgtttgacgctgcggttcatccctgtggaccgtgaggatactgcgtactcgtacaaggcgcggttcaccctagctgtgggtgataaccgtgtgctggacatggcttccacgtactttgacatccgcggcgtgctggacaggggccctacttttaagccctactctggcactgcctacaacgccctggctcccaagggtgccccaaatccttgcgaatgggatgaagctgctactgctcttgaaataaacctagaagaagaggacgatgacaacgaagacgaagtagacgagcaagctgagcagcaaaaaactcacgtatttgggcaggcgccttattctggtataaatattacaaaggagggtattcaaataggtgtcgaaggtcaaacacctaaatatgccgataaaacatttcaacctgaacctcaaataggagaatctcagtggtacgaaacagaaattaatcatgcagctgggagagtcctaaaaaagactaccccaatgaaaccatgttacggttcatatgcaaaacccacaaatgaaaatggagggcaaggcattcttgtaaagcaacaaaatggaaagctagaaagtcaagtggaaatgcaatttttctcaactactgaggcagccgcaggcaatggtgataacttgactcctaaagtggtattgtacagtgaagatgtagatatagaaaccccagacactcatatttcttacatgcccactattaaggaaggtaactcacgagaactaatgggccaacaatctatgcccaacaggcctaattacattgcttttagggacaattttattggtctaatgtattacaacagcacgggtaatatgggtgttctggcgggccaagcatcgcagttgaatgctgttgtagatttgcaagacagaaacacagagctttcataccagcttttgcttgattccattggtgatagaaccaggtacttttctatgtggaatcaggctgttgacagctatgatccagatgttagaattattgaaaatcatggaactgaagatgaacttccaaattactgctttccactgggaggtgtgattaatacagagactcttaccaaggtaaaacctaaaacaggtcaggaaaatggatgggaaaaagatgctacagaattttcagataaaaatgaaataagagttggaaataattttgccatggaaatcaatctaaatgccaacctgtggagaaatttcctgtactccaacatagcgctgtatttgcccgacaagctaaagtacagtccttccaacgtaaaaatttctgataacccaaacacctacgactacatgaacaagcgagtggtggctcccgggctagtggactgctacattaaccttggagcacgctggtcccttgactatatggacaacgtcaacccatttaaccaccaccgcaatgctggcctgcgctaccgctcaatgttgctgggcaatggtcgctatgtgcccttccacatccaggtgcctcagaagttctttgccattaaaaacctccttctcctgccgggctcatacacctacgagtggaacttcaggaaggatgttaacatggttctgcagagctccctaggaaatgacctaagggttgacggagccagcattaagtttgatagcatttgcctttacgccaccttcttccccatggcccacaacaccgcctccacgcttgaggccatgcttagaaacgacaccaacgaccagtcctttaacgactatctctccgccgccaacatgctctaccctatacccgccaacgctaccaacgtgcccatatccatcccctcccgcaactgggcggctttccgcggctgggccttcacgcgccttaagactaaggaaaccccatcactgggctcgggctacgacccttattacacctactctggctctataccctacctagatggaaccttttacctcaaccacacctttaagaaggtggccattacctttgactcttctgtcagctggcctggcaatgaccgcctgcttacccccaacgagtttgaaattaagcgctcagttgacggggagggttacaacgttgcccagtgtaacatgaccaaagactggttcctggtacaaatgctagctaactataacattggctaccagggcttctatatcccagagagctacaaggaccgcatgtactccttctttagaaacttccagcccatgagccgtcaggtggtggatgatactaaatacaaggactaccaacaggtgggcatcctacaccaacacaacaactctggatttgttggctaccttgcccccaccatgcgcgaaggacaggcctaccctgctaacttcccctatccgcttataggcaagaccgcagttgacagcattacccagaaaaagtttctttgcgatcgcaccctttggcgcatcccattctccagtaactttatgtccatgggcgcactcacagacctgggccaaaaccttctctacgccaactccgcccacgcgctagacatgacttttgaggtggatcccatggacgagcccacccttctttatgttttgtttgaagtctttgacgtggtccgtgtgcaccagccgcaccgcggcgtcatcgaaaccgtgtacctgcgcacgcccttctcggccggcaacgccacaacataaagaagcaagcaacatcaacaacagctgccgccatgggctccagtgagcaggaactgaaagccattgtcaaagatcttggttgtgggccatattttttgggcacctatgacaagcgctttccaggctttgtttctccacacaagctcgcctgcgccatagtcaatacggccggtcgcgagactgggggcgtacactggatggcctttgcctggaacccgcactcaaaaacatgctacctctttgagccctttggcttttctgaccagcgactcaagcaggtttaccagtttgagtacgagtcactcctgcgccgtagcgccattgcttcttcccccgaccgctgtataacgctggaaaagtccacccaaagcgtacaggggcccaactcggccgcctgtggactattctgctgcatgtttctccacgcctttgccaactggccccaaactcccatggatcacaaccccaccatgaaccttattaccggggtacccaactccatgctcaacagtccccaggtacagcccaccctgcgtcgcaaccaggaacagctctacagcttcctggagcgccactcgccctacttccgcagccacagtgcgcagattaggagcgccacttctttttgtcacttgaaaaacatgtaaaaataatgtactagagacactttcaataaaggcaaatgcttttatttgtacactctcgggtgattatttacccccacccttgccgtctgcgccgtttaaaaatcaaaggggttctgccgcgcatcgctatgcgccactggcagggacacgttgcgatactggtgtttagtgctccacttaaactcaggcacaaccatccgcggcagctcggtgaagttttcactccacaggctgcgcaccatcaccaacgcgtttagcaggtcgggcgccgatatcttgaagtcgcagttggggcctccgccctgcgcgcgcgagttgcgatacacagggttgcagcactggaacactatcagcgccgggtggtgcacgctggccagcacgctcttgtcggagatcagatccgcgtccaggtcctccgcgttgctcagggcgaacggagtcaactttggtagctgccttcccaaaaagggcgcgtgcccaggctttgagttgcactcgcaccgtagtggcatcaaaaggtgaccgtgcccggtctgggcgttaggatacagcgcctgcataaaagccttgatctgcttaaaagccacctgagcctttgcgccttcagagaagaacatgccgcaagacttgccggaaaactgattggccggacaggccgcgtcgtgcacgcagcaccttgcgtcggtgttggagatctgcaccacatttcggccccaccggttcttcacgatcttggccttgctagactgctccttcagcgcgcgctgcccgttttcgctcgtcacatccatttcaatcacgtgctccttatttatcataatgcttccgtgtagacacttaagctcgccttcgatctcagcgcagcggtgcagccacaacgcgcagcccgtgggctcgtgatgcttgtaggtcacctctgcaaacgactgcaggtacgcctgcaggaatcgccccatcatcgtcacaaaggtcttgttgctggtgaaggtcagctgcaacccgcggtgctcctcgttcagccaggtcttgcatacggccgccagagcttccacttggtcaggcagtagtttgaagttcgcctttagatcgttatccacgtggtacttgtccatcagcgcgcgcgcagcctccatgcccttctcccacgcagacacgatcggcacactcagcgggttcatcaccgtaatttcactttccgcttcgctgggctcttcctcttcctcttgcgtccgcataccacgcgccactgggtcgtcttcattcagccgccgcactgtgcgcttacctcctttgccatgcttgattagcaccggtgggttgctgaaacccaccatttgtagcgccacatcttctctttcttcctcgctgtccacgattacctctggtgatggcgggcgctcgggcttgggagaagggcgcttctttttcttcttgggcgcaatggccaaatccgccgccgaggtcgatggccgcgggctgggtgtgcgcggcaccagcgcgtcttgtgatgagtcttcctcgtcctcggactcgatacgccgcctcatccgcttttttgggggcgcccggggaggcggcggcgacggggacggggacgacacgtcctccatggttgggggacgtcgcgccgcaccgcgtccgcgctcgggggtggtttcgcgctgctcctcttcccgactggccatttccttctcctataggcagaaaaagatcatggagtcagtcgagaagaaggacagcctaaccgccccctctgagttcgccaccaccgcctccaccgatgccgccaacgcgcctaccaccttccccgtcgaggcacccccgcttgaggaggaggaagtgattatcgagcaggacccaggttttgtaagcgaagacgacgaggaccgctcagtaccaacagaggataaaaagcaagaccaggacaacgcagaggcaaacgaggaacaagtcgggcggggggacgaaaggcatggcgactacctagatgtgggagacgacgtgctgttgaagcatctgcagcgccagtgcgccattatctgcgacgcgttgcaagagcgcagcgatgtgcccctcgccatagcggatgtcagccttgcctacgaacgccacctattctcaccgcgcgtaccccccaaacgccaagaaaacggcacatgcgagcccaacccgcgcctcaacttctaccccgtatttgccgtgccagaggtgcttgccacctatcacatctttttccaaaactgcaagatacccctatcctgccgtgccaaccgcagccgagcggacaagcagctggccttgcggcagggcgctgtcatacctgatatcgcctcgctcaacgaagtgccaaaaatctttgagggtcttggacgcgacgagaagcgcgcggcaaacgctctgcaacaggaaaacagcgaaaatgaaagtcactctggagtgttggtggaactcgagggtgacaacgcgcgcctagccgtactaaaacgcagcatcgaggtcacccactttgcctacccggcacttaacctaccccccaaggtcatgagcacagtcatgagtgagctgatcgtgcgccgtgcgcagcccctggagagggatgcaaatttgcaagaacaaacagaggagggcctacccgcagttggcgacgagcagctagcgcgctggcttcaaacgcgcgagcctgccgacttggaggagcgacgcaaactaatgatggccgcagtgctcgttaccgtggagcttgagtgcatgcagcggttctttgctgacccggagatgcagcgcaagctagaggaaacattgcactacacctttcgacagggctacgtacgccaggcctgcaagatctccaacgtggagctctgcaacctggtctcctaccttggaattttgcacgaaaaccgccttgggcaaaacgtgcttcattccacgctcaagggcgaggcgcgccgcgactacgtccgcgactgcgtttacttatttctatgctacacctggcagacggccatgggcgtttggcagcagtgcttggaggagtgcaacctcaaggagctgcagaaactgctaaagcaaaacttgaaggacctatggacggccttcaacgagcgctccgtggccgcgcacctggcggacatcattttccccgaacgcctgcttaaaaccctgcaacagggtctgccagacttcaccagtcaaagcatgttgcagaactttaggaactttatcctagagcgctcaggaatcttgcccgccacctgctgtgcacttcctagcgactttgtgcccattaagtaccgcgaatgccctccgccgctttggggccactgctaccttctgcagctagccaactaccttgcctaccactctgacataatggaagacgtgagcggtgacggtctactggagtgtcactgtcgctgcaacctatgcaccccgcaccgctccctggtttgcaattcgcagctgcttaacgaaagtcaaattatcggtacctttgagctgcagggtccctcgcctgacgaaaagtccgcggctccggggttgaaactcactccggggctgtggacgtcggcttaccttcgcaaatttgtacctgaggactaccacgcccacgagattaggttctacgaagaccaatcccgcccgcctaatgcggagcttaccgcctgcgtcattacccagggccacattcttggccaattgcaagccatcaacaaagcccgccaagagtttctgctacgaaagggacggggggtttacttggacccccagtccggcgaggagctcaacccaatccccccgccgccgcagccctatcagcagcagccgcgggcccttgcttcccaggatggcacccaaaaagaagctgcagctgccgccgccacccacggacgaggaggaatactgggacagtcaggcagaggaggttttggacgaggaggaggaggacatgatggaagactgggagagcctagacgaggaagcttccgaggtcgaagaggtgtcagacgaaacaccgtcaccctcggtcgcattcccctcgccggcgccccagaaatcggcaaccggttccagcatggctacaacctccgctcctcaggcgccgccggcactgcccgttcgccgacccaaccgtagatgggacaccactggaaccagggccggtaagtccaagcagccgccgccgttagcccaagagcaacaacagcgccaaggctaccgctcatggcgcgggcacaagaacgccatagttgcttgcttgcaagactgtgggggcaacatctccttcgcccgccgctttcttctctaccatcacggcgtggccttcccccgtaacatcctgcattactaccgtcatctctacagcccatactgcaccggcggcagcggcagcaacagcagcggccacacagaagcaaaggcgaccggatagcaagactctgacaaagcccaagaaatccacagcggcggcagcagcaggaggaggagcgctgcgtctggcgcccaacgaacccgtatcgacccgcgagcttagaaacaggatttttcccactctgtatgctatatttcaacagagcaggggccaagaacaagagctgaaaataaaaaacaggtctctgcgatccctcacccgcagctgcctgtatcacaaaagcgaagatcagcttcggcgcacgctggaagacgcggaggctctcttcagtaaatactgcgcgctgactcttaaggactagtttcgcgccctttctcaaatttaagcgcgaaaactacgtcatctccagcggccacacccggcgccagcacctgttgtcagcgccattatgagcaaggaaattcccacgccctacatgtggagttaccagccacaaatgggacttgcggctggagctgcccaagactactcaacccgaataaactacatgagcgcgggaccccacatgatatcccgggtcaacggaatacgcgcccaccgaaaccgaattctcctggaacaggcggctattaccaccacacctcgtaataaccttaatccccgtagttggcccgctgccctggtgtaccaggaaagtcccgctcccaccactgtggtacttcccagagacgcccaggccgaagttcagatgactaactcaggggcgcagcttgcgggcggctttcgtcacagggtgcggtcgcccgggcagggtataactcacctgacaatcagagggcgaggtattcagctcaacgacgagtcggtgagctcctcgcttggtctccgtccggacgggacatttcagatcggcggcgccggccgctcttcattcacgcctcgtcaggcaatcctaactctgcagacctcgtcctctgagccgcgctctggaggcattggaactctgcaatttattgaggagtttgtgccatcggtctactttaaccccttctcgggacctcccggccactatccggatcaatttattcctaactttgacgcggtaaaggactcggcggacggctacgactgaatgttaagtggagaggcagagcaactgcgcctgaaacacctggtccactgtcgccgccacaagtgctttgcccgcgactccggtgagttttgctactttgaattgcccgaggatcatatcgagggcccggcgcacggcgtccggcttaccgcccagggagagcttgcccgtagcctgattcgggagtttacccagcgccccctgctagttgagcgggacaggggaccctgtgttctcactgtgatttgcaactgtcctaaccctggattacatcaagatcctctagttaatgtcaggtcgcctaagtcgattaactagagtacccggggatcttattccctttaactaataaaaaaaaataataaagcatcacttacttaaaatcagttagcaaatttctgtccagtttattcagcagcacctccttgccctcctcccagctctggtattgcagcttcctcctggctgcaaactttctccacaatctaaatggaatgtcagtttcctcctgttcctgtccatccgcacccactatcttcatgttgttgcagatgaagcgcgcaagaccgtctgaagataccttcaaccccgtgtatccatatgacacggaaaccggtcctccaactgtgccttttcttactcctccctttgtatcccccaatgggtttcaagagagtccccctggggtactctctttgcgcctatccgaacctctagttacctccaatggcatgcttgcgctcaaaatgggcaacggcctctctctggacgaggccggcaaccttacctcccaaaatgtaaccactgtgagcccacctctcaaaaaaaccaagtcaaacataaacctggaaatatctgcacccctcacagttacctcagaagccctaactgtggctgccgccgcacctctaatggtcgcgggcaacacactcaccatgcaatcacaggccccgctaaccgtgcacgactccaaacttagcattgccacccaaggacccctcacagtgtcagaaggaaagctagccctgcaaacatcaggccccctcaccaccaccgatagcagtacccttactatcactgcctcaccccctctaactactgccactggtagcttgggcattgacttgaaagagcccatttatacacaaaatggaaaactaggactaaagtacggggctcctttgcatgtaacagacgacctaaacactttgaccgtagcaactggtccaggtgtgactattaataatacttccttgcaaactaaagttactggagccttgggttttgattcacaaggcaatatgcaacttaatgtagcaggaggactaaggattgattctcaaaacagacgccttatacttgatgttagttatccgtttgatgctcaaaaccaactaaatctaagactaggacagggccctctttttataaactcagcccacaacttggatattaactacaacaaaggcctttacttgtttacagcttcaaacaattccaaaaagcttgaggttaacctaagcactgccaaggggttgatgtttgacgctacagccatagccattaatgcaggagatgggcttgaatttggttcacctaatgcaccaaacacaaatcccctcaaaacaaaaattggccatggcctagaatttgattcaaacaaggctatggttcctaaactaggaactggccttagttttgacagcacaggtgccattacagtaggaaacaaaaataatgataagctaactttgtggaccggaataaaccctccacctaactgtcaaattgtggaaaacactaatacaaatgatggcaaacttactttagtattagtaaaaaatggagggcttgttaatggctacgtgtctctagttggtgtatcagacactgtgaaccaaatgttcacacaaaagacagcaaacatccaattaagattatattttgactcttctggaaatctattaactgaggaatcagacttaaaaattccacttaaaaataaatcttctacagcgaccagtgaaactgtagccagcagcaaagcctttatgccaagtactacagcttatcccttcaacaccactactagggatagtgaaaactacattcatggaatatgttactacatgactagttatgatagaagtctatttcccttgaacatttctataatgctaaacagccgtatgatttcttccaatgttgcctatgccatacaatttgaatggaatctaaatgcaagtgaatctccagaaagcaacatagctacgctgaccacatccccctttttcttttcttacattacagaagacgacaactaaagaatcgtttgtgttatgtttcaacgtgtttatttttcaattgcagaaaatttcaagtcatttttcattcagtagtatagccccaccaccacatagcttatacagatcaccgtaccttaatcaaactcacagaaccctagtattcaacctgccacctccctcccaacacacagagtacacagtcctttctccccggctggccttaaaaagcatcatatcatgggtaacagacatattcttaggtgttatattccacacggtttcctgtcgagccaaacgctcatcagtgatattaataaactccccgggcagctcacttaagttcatgtcgctgtccagctgctgagccacaggctgctgtccaacttgcggttgcttaacgggcggcgaaggagaagtccacgcctacatgggggtagagtcataatcgtgcatcaggatagggcggtggtgctgcagcagcgcgcgaataaactgctgccgccgccgctccgtcctgcaggaatacaacatggcagtggtctcctcagcgatgattcgcaccgcccgcagcataaggcgccttgtcctccgggcacagcagcgcaccctgatctcacttaaatcagcacagtaactgcagcacagcaccacaatattgttcaaaatcccacagtgcaaggcgctgtatccaaagctcatggcggggaccacagaacccacgtggccatcataccacaagcgcaggtagattaagtggcgacccctcataaacacgctggacataaacattacctcttttggcatgttgtaattcaccacctcccctctgattaaacatggcgccatccaccaccatcctaaaccagctggccaaaacctgcccgccggctatacactgcagggaaccgggactggaacaatgacagtggagagcccaggactcgtaaccatggatcatcatgctcgtcatgatatcaatgttggcacaacacaggcacacgtgcatacacttcctcaggattacaagctcctcccgcgttagaaccatatcccagggaacaacccattcctgaatcagcgtaaatcccacactgcagggaagacctcgcacgtaactcacgttgtgcattgtcaaagtgttacattcgggcagcagcggatgatcctccagtatggtagcgcgggtttctgtctcaaaaggaggtagacgatccctactgtacggagtgcgccgagacaaccgagatcgtgttggtcgtagtgtcatgccaaatggaacgccggacgtagtcatatttcctgaagcaaaaccaggtgcgggcgtgacaaacagatctgcgtctccggtctcgccgcttagatcgctctgtgtagtagttgtagtatatccactctctcaaagcatccaggcgccccctggcttcgggttctatgtaaactccttcatgcgccgctgccctgataacatccaccaccgcagaataagccacacccagccaacctacacattcgttctgcgagtcacacacgggaggagcgggaagagctggaagaaccatgtttttttttttattccaaaagattatccaaaacctcaaaatgaagatctattaagtgaacgcgctcccctccggtggcgtggtcaaactctacagccaaagaacagataatggcatttgtaagatgttgcacaatggcttccaaaaggcaaacggccctcacgtccaagtggacgtaaaggctaaacccttcagggtgaatctcctctataaacattccagcaccttcaaccatgcccaaataattctcatctcgccaccttctcaatatatctctaagcaaatcccgaatattaagtccggccattgtaaaaatctgctccagagcgccctccaccttcagcctcaagcagcgaatcatgattgcaaaaattcaggttcctcacagacctgtataagattcaaaagcggaacattaacaaaaataccgcgatcccgtaggtcccttcgcagggccagctgaacataatcgtgcaggtctgcacggaccagcgcggccacttccccgccaggaaccatgacaaaagaacccacactgattatgacacgcatactcggagctatgctaaccagcgtagccccgatgtaagcttgttgcatgggcggcgatataaaatgcaaggtgctgctcaaaaaatcaggcaaagcctcgcgcaaaaaagaaagcacatcgtagtcatgctcatgcagataaaggcaggtaagctccggaaccaccacagaaaaagacaccatttttctctcaaacatgtctgcgggtttctgcataaacacaaaataaaataacaaaaaaacatttaaacattagaagcctgtcttacaacaggaaaaacaacccttataagcataagacggactacggccatgccggcgtgaccgtaaaaaaactggtcaccgtgattaaaaagcaccaccgacagctcctcggtcatgtccggagtcataatgtaagactcggtaaacacatcaggttgattcacatcggtcagtgctaaaaagcgaccgaaatagcccgggggaatacatacccgcaggcgtagagacaacattacagcccccataggaggtataacaaaattaataggagagaaaaacacataaacacctgaaaaaccctcctgcctaggcaaaatagcaccctcccgctccagaacaacatacagcgcttccacagcggcagccataacagtcagccttaccagtaaaaaagaaaacctattaaaaaaacaccactcgacacggcaccagctcaatcagtcacagtgtaaaaaagggccaagtgcagagcgagtatatataggactaaaaaatgacgtaacggttaaagtccacaaaaaacacccagaaaaccgcacgcgaacctacgcccagaaacgaaagccaaaaaacccacaacttcctcaaatcgtcacttccgttttcccacgttacgtcacttcccattttaagaaaactacaattcccaacacatacaagttactccgccctaaaacctacgtcacccgccccgttcccacgccccgcgccacgtcacaaactccaccccctcattatcatattggcttcaatccaaaataaggtatattattgatgatg

SEQ ID NO: 3 - DNA, 34833 bp, Artificial Sequence
  pRCA-E4dl355
ttaattaagaattaattcgatcctgaatggcgaatggacgcgccctgtagcggcgcattaagcgcggcgggtgtggtggttacgcgcagcgtgaccgctacacttgccagcgccctagcgcccgctcctttcgctttcttcccttcctttctcgccacgttcgccggctttccccgtcaagctctaaatcgggggctccctttagggttccgatttagtgctttacggcacctcgaccccaaaaaacttgattagggtgatggttcacgtagtgggccatcgccctgatagacggtttttcgccctttgacgttggagtccacgttctttaatagtggactcttgttccaaactggaacaacactcaaccctatctcggtctattcttttgatttataagggattttgccgatttcggcctattggttaaaaaatgagctgatttaacaaaaattttaacaaaattcagaagaactcgtcaagaaggcgatagaaggcgatgcgctgcgaatcgggagcggcgataccgtaaagcacgaggaagcggtcagcccattcgccgccaagctcttcagcaatatcacgggtagccaacgctatgtcctgatagcggtccgccacacccagccggccacagtcgatgaatccagaaaagcggccattttccaccatgatattcggcaagcaggcatcgccatgggtcacgacgagatcctcgccgtcgggcatgctcgccttgagcctggcgaacagttcggctggcgcgagcccctgatgctcttcgtccagatcatcctgatcgacaagaccggcttccatccgagtacgtgctcgctcgatgcgatgtttcgcttggtggtcgaatgggcaggtagccggatcaagcgtatgcagccgccgcattgcatcagccatgatggatactttctcggcaggagcaaggtgagatgacaggagatcctgccccggcacttcgcccaatagcagccagtcccttcccgcttcagtgacaacgtcgagcacagctgcgcaaggaacgcccgtcgtggccagccacgatagccgcgctgcctcgtcttgcagttcattcagggcaccggacaggtcggtcttgacaaaaagaaccgggcgcccctgcgctgacagccggaacacggcggcatcagagcagccgattgtctgttgtgcccagtcatagccgaatagcctctccacccaagcggccggagaacctgcgtgcaatccatcttgttcaatcatgcgaaacgatcctcatcctgtctcttgatcagagcttgatcccctgcgccatcagatccttggcggcaagaaagccatccagtttactttgcagggcttcccaaccttaccagagggcgccccagctggcaattccggttcgcttgctgtccataaaaccgcccagtctagctatcgccatgtaagcccactgcaagctacctgctttctctttgcgcttgcgttttcccttgtccagatagcccagtagctgacattcatccggggtcagcaccgtttctgcggactggctttctacgtgaaaaggatctaggtgaagatcctttttgataatctcatggctgcagcaatggcaacaacgttgcgcaaactattaactggcgaactacttactctagcttcccggcaacaattaatagactggatggaggcggataaagttgcaggaccacttctgcgctcggcccttccggctggctggtttattgctgataaatctggagccggtgagcgtgggtctcgcggtatcattgcagcactggggccagatggtaagccctcccgtatcgtagttatctacacgacggggagtcaggcaactatggatgaacgaaatagacagatcgctgagataggtgcctcactgattaagcattggtaactgtcagaccaagtttactcatatatactttagattgatttaaaacttcatttttaatttaaaaggatctaggtgaagatcctttttgataatctcatgaccaaaatcccttaacgtgagttttcgttccactgagcgtcagaccccgtagaaaagatcaaaggatcttcttgagatcctttttttctgcgcgtaatctgctgcttgcaaacaaaaaaaccaccgctaccagcggtggtttgtttgccggatcaagagctaccaactctttttccgaaggtaactggcttcagcagagcgcagataccaaatactgtccttctagtgtagccgtagttaggccaccacttcaagaactctgtagcaccgcctacatacctcgctctgctaatcctgttaccagtggctgctgccagtggcgataagtcgtgtcttaccgggttggactcaagacgatagttaccggataaggcgcagcggtcgggctgaacggggggttcgtgcacacagcccagcttggagcgaacgacctacaccgaactgagatacctacagcgtgagctatgagaaagcgccacgcttcccgaagggagaaaggcggacaggtatccggtaagcggcagggtcggaacaggagagcgcacgagggagcttccagggggaaacgcctggtatctttatagtcctgtcgggtttcgccacctctgacttgagcgtcgatttttgtgatgctcgtcaggggggcggagcctatggaaaaacgccagcaacgcggcctttttacggttcctggccttttgctggccttttgctcacatgttctttcctgcgttatcccctgattctgtggataaccgtattaccgcctttgagtgagctgataccgctcgccgcagccgaacgaccgagcgcagcgagtcagtgagcgaggaagcggaagagcgcctgatgcggtattttctccttacgcatctgtgcggtatttcacaccgcatatggatccatgcatgttaattaacatcatcaataatataccttattttggattgaagccaatatgataatgagggggtggagtttgtgacgtggcgcggggcgtgggaacggggcgggtgacgtagtagtgtggcggaagtgtgatgttgcaagtgtggcggaacacatgtaagcgacggatgtggcaaaagtgacgtttttggtgtgcgccggtgtacacaggaagtgacaattttcgcgcggttttaggcggatgttgtagtaaatttgggcgtaaccgagtaagatttggccattttcgcgggaaaactgaataagaggaagtgaaatctgaataattttgtgttactcatagcgcgtaatatttgtctagggccgcggggactttgaccgtttacgtggagactcgcccaggtgtttttctcaggtgttttccgcgttccgggtcaaagttggcgttttattattatagtcagctgacgtgtagtgtatttatacccggtgagttcctcaagaggccactcttgagtgccagcgagtagagttttctcctccgagccgctccgacaccgggactgaaaatgagacatattatctgccacggaggtgttattaccgaagaaatggccgccagtcttttggaccagctgatcgaagaggtactggctgataatcttccacctcctagccattttgaaccacctacccttcacgaactgtatgatttagacgtgacggcccccgaagatcccaacgaggaggcggtttcgcagatttttcccgactctgtaatgttggcggtgcaggaagggattgacttactcacttttccgccggcgcccggttctccggagccgcctcacctttcccggcagcccgagcagccggagcagagagccttgggtccggtttctatgccaaaccttgtaccggaggtgatcgatcttacctgccacgaggctggctttccacccagtgacgacgaggatgaagagggtgaggagtttgtgttagattatgtggagcaccccgggcacggttgcaggtcttgtcattatcaccggaggaatacgggggacccagatattatgtgttcgctttgctatatgaggacctgtggcatgtttgtctacagtaagtgaaaattatgggcagtgggtgatagagtggtgggtttggtgtggtaattttttttttaatttttacagttttgtggtttaaagaattttgtattgtgatttttttaaaaggtcctgtgtctgaacctgagcctgagcccgagccagaaccggagcctgcaagacctacccgccgtcctaaaatggcgcctgctatcctgagacgcccgacatcacctgtgtctagagaatgcaatagtagtacggatagctgtgactccggtccttctaacacacctcctgagatacacccggtggtcccgctgtgccccattaaaccagttgccgtgagagttggtgggcgtcgccaggctgtggaatgtatcgaggacttgcttaacgagcctgggcaacctttggacttgagctgtaaacgccccaggccataaggtgtaaacctgtgattgcgtgtgtggttaacgcctttgtttgctgaatgagttgatgtaagtttaataaagggtgagataatgtttaacttgcatggcgtgttaaatggggcggggcttaaagggtatataatgcgccgtgggctaatcttggttacatctgacctcatggaggcttgggagtgtttggaagatttttctgctgtgcgtaacttgctggaacagagctctaacagtacctcttggttttggaggtttctgtggggctcatcccaggcaaagttagtctgcagaattaaggaggattacaagtgggaatttgaagagcttttgaaatcctgtggtgagctgtttgattctttgaatctgggtcaccaggcgcttttccaagagaaggtcatcaagactttggatttttccacaccggggcgcgctgcggctgctgttgcttttttgagttttataaaggataaatggagcgaagaaacccatctgagcggggggtacctgctggattttctggccatgcatctgtggagagcggttgtgagacacaagaatcgcctgctactgttgtcttccgtccgcccggcgataataccgacggaggagcagcagcagcagcaggaggaagccaggcggcggcggcaggagcagagcccatggaacccgagagccggcctggaccctcgggaatgaatgttgtacaggtggctgaactgtatccagaactgagacgcattttgacaattacagaggatgggcaggggctaaagggggtaaagagggagcggggggcttgtgaggctacagaggaggctaggaatctagcttttagcttaatgaccagacaccgtcctgagtgtattacttttcaacagatcaaggataattgcgctaatgagcttgatctgctggcgcagaagtattccatagagcagctgaccacttactggctgcagccaggggatgattttgaggaggctattagggtatatgcaaaggtggcacttaggccagattgcaagtacaagatcagcaaacttgtaaatatcaggaattgttgctacatttctgggaacggggccgaggtggagatagatacggaggatagggtggcctttagatgtagcatgataaatatgtggccgggggtgcttggcatggacggggtggttattatgaatgtaaggtttactggccccaattttagcggtacggttttcctggccaataccaaccttatcctacacggtgtaagcttctatgggtttaacaatacctgtgtggaagcctggaccgatgtaagggttcggggctgtgccttttactgctgctggaagggggtggtgtgtcgccccaaaagcagggcttcaattaagaaatgcctctttgaaaggtgtaccttgggtatcctgtctgagggtaactccagggtgcgccacaatgtggcctccgactgtggttgcttcatgctagtgaaaagcgtggctgtgattaagcataacatggtatgtggcaactgcgaggacagggcctctcagatgctgacctgctcggacggcaactgtcacctgctgaagaccattcacgtagccagccactctcgcaaggcctggccagtgtttgagcataacatactgacccgctgttccttgcatttgggtaacaggaggggggtgttcctaccttaccaatgcaatttgagtcacactaagatattgcttgagcccgagagcatgtccaaggtgaacctgaacggggtgtttgacatgaccatgaagatctggaaggtgctgaggtacgatgagacccgcaccaggtgcagaccctgcgagtgtggcggtaaacatattaggaaccagcctgtgatgctggatgtgaccgaggagctgaggcccgatcacttggtgctggcctgcacccgcgctgagtttggctctagcgatgaagatacagattgaggtactgaaatgtgtgggcgtggcttaagggtgggaaagaatatataaggtgggggtcttatgtagttttgtatctgttttgcagcagccgccgccgccatgagcaccaactcgtttgatggaagcattgtgagctcatatttgacaacgcgcatgcccccatgggccggggtgcgtcagaatgtgatgggctccagcattgatggtcgccccgtcctgcccgcaaactctactaccttgacctacgagaccgtgtctggaacgccgttggagactgcagcctccgccgccgcttcagccgctgcagccaccgcccgcgggattgtgactgactttgctttcctgagcccgcttgcaagcagtgcagcttcccgttcatccgcccgcgatgacaagttgacggctcttttggcacaattggattctttgacccgggaacttaatgtcgtttctcagcagctgttggatctgcgccagcaggtttctgccctgaaggcttcctcccctcccaatgcggtttaaaacataaataaaaaaccagactctgtttggatttggatcaagcaagtgtcttgctgtctttatttaggggttttgcgcgcgcggtaggcccgggaccagcggtctcggtcgttgagggtcctgtgtattttttccaggacgtggtaaaggtgactctggatgttcagatacatgggcataagcccgtctctggggtggaggtagcaccactgcagagcttcatgctgcggggtggtgttgtagatgatccagtcgtagcaggagcgctgggcgtggtgcctaaaaatgtctttcagtagcaagctgattgccaggggcaggcccttggtgtaagtgtttacaaagcggttaagctgggatgggtgcatacgtggggatatgagatgcatcttggactgtatttttaggttggctatgttcccagccatatccctccggggattcatgttgtgcagaaccaccagcacagtgtatccggtgcacttgggaaatttgtcatgtagcttagaaggaaatgcgtggaagaacttggagacgcccttgtgacctccaagattttccatgcattcgtccataatgatggcaatgggcccacgggcggcggcctgggcgaagatatttctgggatcactaacgtcatagttgtgttccaggatgagatcgtcataggccatttttacaaagcgcgggcggagggtgccagactgcggtataatggttccatccggcccaggggcgtagttaccctcacagatttgcatttcccacgctttgagttcagatggggggatcatgtctacctgcggggcgatgaagaaaacggtttccggggtaggggagatcagctgggaagaaagcaggttcctgagcagctgcgacttaccgcagccggtgggcccgtaaatcacacctattaccgggtgcaactggtagttaagagagctgcagctgccgtcatccctgagcaggggggccacttcgttaagcatgtccctgactcgcatgttttccctgaccaaatccgccagaaggcgctcgccgcccagcgatagcagttcttgcaaggaagcaaagtttttcaacggtttgagaccgtccgccgtaggcatgcttttgagcgtttgaccaagcagttccaggcggtcccacagctcggtcacctgctctacggcatctcgatccagcatatctcctcgtttcgcgggttggggcggctttcgctgtacggcagtagtcggtgctcgtccagacgggccagggtcatgtctttccacgggcgcagggtcctcgtcagcgtagtctgggtcacggtgaaggggtgcgctccgggctgcgcgctggccagggtgcgcttgaggctggtcctgctggtgctgaagcgctgccggtcttcgccctgcgcgtcggccaggtagcatttgaccatggtgtcatagtccagcccctccgcggcgtggcccttggcgcgcagcttgcccttggaggaggcgccgcacgaggggcagtgcagacttttgagggcgtagagcttgggcgcgagaaataccgattccggggagtaggcatccgcgccgcaggccccgcagacggtctcgcattccacgagccaggtgagctctggccgttcggggtcaaaaaccaggtttcccccatgctttttgatgcgtttcttacctctggtttccatgagccggtgtccacgctcggtgacgaaaaggctgtccgtgtccccgtatacagacttgagaggcctgtcctcgagcggtgttccgcggtcctcctcgtatagaaactcggaccactctgagacaaaggctcgcgtccaggccagcacgaaggaggctaagtgggaggggtagcggtcgttgtccactagggggtccactcgctccagggtgtgaagacacatgtcgccctcttcggcatcaaggaaggtgattggtttgtaggtgtaggccacgtgaccgggtgttcctgaaggggggctataaaagggggtgggggcgcgttcgtcctcactctcttccgcatcgctgtctgcgagggccagctgttggggtgagtactccctctgaaaagcgggcatgacttctgcgctaagattgtcagtttccaaaaacgaggaggatttgatattcacctggcccgcggtgatgcctttgagggtggccgcatccatctggtcagaaaagacaatctttttgttgtcaagcttggtggcaaacgacccgtagagggcgttggacagcaacttggcgatggagcgcagggtttggtttttgtcgcgatcggcgcgctccttggccgcgatgtttagctgcacgtattcgcgcgcaacgcaccgccattcgggaaagacggtggtgcgctcgtcgggcaccaggtgcacgcgccaaccgcggttgtgcagggtgacaaggtcaacgctggtggctacctctccgcgtaggcgctcgttggtccagcagaggcggccgcccttgcgcgagcagaatggcggtagggggtctagctgcgtctcgtccggggggtctgcgtccacggtaaagaccccgggcagcaggcgcgcgtcgaagtagtctatcttgcatccttgcaagtctagcgcctgctgccatgcgcgggcggcaagcgcgcgctcgtatgggttgagtgggggaccccatggcatggggtgggtgagcgcggaggcgtacatgccgcaaatgtcgtaaacgtagaggggctctctgagtattccaagatatgtagggtagcatcttccaccgcggatgctggcgcgcacgtaatcgtatagttcgtgcgagggagcgaggaggtcgggaccgaggttgctacgggcgggctgctctgctcggaagactatctgcctgaagatggcatgtgagttggatgatatggttggacgctggaagacgttgaagctggcgtctgtgagacctaccgcgtcacgcacgaaggaggcgtaggagtcgcgcagcttgttgaccagctcggcggtgacctgcacgtctagggcgcagtagtccagggtttccttgatgatgtcatacttatcctgtcccttttttttccacagctcgcggttgaggacaaactcttcgcggtctttccagtactcttggatcggaaacccgtcggcctccgaacggtaagagcctagcatgtagaactggttgacggcctggtaggcgcagcatcccttttctacgggtagcgcgtatgcctgcgcggccttccggagcgaggtgtgggtgagcgcaaaggtgtccctgaccatgactttgaggtactggtatttgaagtcagtgtcgtcgcatccgccctgctcccagagcaaaaagtccgtgcgctttttggaacgcggatttggcagggcgaaggtgacatcgttgaagagtatctttcccgcgcgaggcataaagttgcgtgtgatgcggaagggtcccggcacctcggaacggttgttaattacctgggcggcgagcacgatctcgtcaaagccgttgatgttgtggcccacaatgtaaagttccaagaagcgcgggatgcccttgatggaaggcaattttttaagttcctcgtaggtgagctcttcaggggagctgagcccgtgctctgaaagggcccagtctgcaagatgagggttggaagcgacgaatgagctccacaggtcacgggccattagcatttgcaggtggtcgcgaaaggtcctaaactggcgacctatggccattttttctggggtgatgcagtagaaggtaagcgggtcttgttcccagcggtcccatccaaggttcgcggctaggtctcgcgcggcagtcactagaggctcatctccgccgaacttcatgaccagcatgaagggcacgagctgcttcccaaaggcccccatccaagtataggtctctacatcgtaggtgacaaagagacgctcggtgcgaggatgcgagccgatcgggaagaactggatctcccgccaccaattggaggagtggctattgatgtggtgaaagtagaagtccctgcgacgggccgaacactcgtgctggcttttgtaaaaacgtgcgcagtactggcagcggtgcacgggctgtacatcctgcacgaggttgacctgacgaccgcgcacaaggaagcagagtgggaatttgagcccctcgcctggcgggtttggctggtggtcttctacttcggctgcttgtccttgaccgtctggctgctcgaggggagttacggtggatcggaccaccacgccgcgcgagcccaaagtccagatgtccgcgcgcggcggtcggagcttgatgacaacatcgcgcagatgggagctgtccatggtctggagctcccgcggcgtcaggtcaggcgggagctcctgcaggtttacctcgcatagacgggtcagggcgcgggctagatccaggtgatacctaatttccaggggctggttggtggcggcgtcgatggcttgcaagaggccgcatccccgcggcgcgactacggtaccgcgcggcgggcggtgggccgcgggggtgtccttggatgatgcatctaaaagcggtgacgcgggcgagcccccggaggtagggggggctccggacccgccgggagagggggcaggggcacgtcggcgccgcgcgcgggcaggagctggtgctgcgcgcgtaggttgctggcgaacgcgacgacgcggcggttgatctcctgaatctggcgcctctgcgtgaagacgacgggcccggtgagcttgaacctgaaagagagttcgacagaatcaatttcggtgtcgttgacggcggcctggcgcaaaatctcctgcacgtctcctgagttgtcttgataggcgatctcggccatgaactgctcgatctcttcctcctggagatctccgcgtccggctcgctccacggtggcggcgaggtcgttggaaatgcgggccatgagctgcgagaaggcgttgaggcctccctcgttccagacgcggctgtagaccacgcccccttcggcatcgcgggcgcgcatgaccacctgcgcgagattgagctccacgtgccgggcgaagacggcgtagtttcgcaggcgctgaaagaggtagttgagggtggtggcggtgtgttctgccacgaagaagtacataacccagcgtcgcaacgtggattcgttgatatcccccaaggcctcaaggcgctccatggcctcgtagaagtccacggcgaagttgaaaaactgggagttgcgcgccgacacggttaactcctcctccagaagacggatgagctcggcgacagtgtcgcgcacctcgcgctcaaaggctacaggggcctcttcttcttcttcaatctcctcttccataagggcctccccttcttcttcttctggcggcggtgggggaggggggacacggcggcgacgacggcgcaccgggaggcggtcgacaaagcgctcgatcatctccccgcggcgacggcgcatggtctcggtgacggcgcggccgttctcgcgggggcgcagttggaagacgccgcccgtcatgtcccggttatgggttggcggggggctgccatgcggcagggatacggcgctaacgatgcatctcaacaattgttgtgtaggtactccgccgccgagggacctgagcgagtccgcatcgaccggatcggaaaacctctcgagaaaggcgtctaaccagtcacagtcgcaaggtaggctgagcaccgtggcgggcggcagcgggcggcggtcggggttgtttctggcggaggtgctgctgatgatgtaattaaagtaggcggtcttgagacggcggatggtcgacagaagcaccatgtccttgggtccggcctgctgaatgcgcaggcggtcggccatgccccaggcttcgttttgacatcggcgcaggtctttgtagtagtcttgcatgagcctttctaccggcacttcttcttctccttcctcttgtcctgcatctcttgcatctatcgctgcggcggcggcggagtttggccgtaggtggcgccctcttcctcccatgcgtgtgaccccgaagcccctcatcggctgaagcagggctaggtcggcgacaacgcgctcggctaatatggcctgctgcacctgcgtgagggtagactggaagtcatccatgtccacaaagcggtggtatgcgcccgtgttgatggtgtaagtgcagttggccataacggaccagttaacggtctggtgacccggctgcgagagctcggtgtacctgagacgcgagtaagccctcgagtcaaatacgtagtcgttgcaagtccgcaccaggtactggtatcccaccaaaaagtgcggcggcggctggcggtagaggggccagcgtagggtggccggggctccgggggcgagatcttccaacataaggcgatgatatccgtagatgtacctggacatccaggtgatgccggcggcggtggtggaggcgcgcggaaagtcgcggacgcggttccagatgttgcgcagcggcaaaaagtgctccatggtcgggacgctctggccggtcaggcgcgcgcaatcgttgacgctctagcgtgcaaaaggagagcctgtaagcgggcactcttccgtggtctggtggataaattcgcaagggtatcatggcggacgaccggggttcgagccccgtatccggccgtccgccgtgatccatgcggttaccgcccgcgtgtcgaacccaggtgtgcgacgtcagacaacgggggagtgctccttttggcttccttccaggcgcggcggctgctgcgctagcttttttggccactggccgcgcgcagcgtaagcggttaggctggaaagcgaaagcattaagtggctcgctccctgtagccggagggttattttccaagggttgagtcgcgggacccccggttcgagtctcggaccggccggactgcggcgaacgggggtttgcctccccgtcatgcaagaccccgcttgcaaattcctccggaaacagggacgagccccttttttgcttttcccagatgcatccggtgctgcggcagatgcgcccccctcctcagcagcggcaagagcaagagcagcggcagacatgcagggcaccctcccctcctcctaccgcgtcaggaggggcgacatccgcggttgacgcggcagcagatggtgattacgaacccccgcggcgccgggcccggcactacctggacttggaggagggcgagggcctggcgcggctaggagcgccctctcctgagcggcacccaagggtgcagctgaagcgtgatacgcgtgaggcgtacgtgccgcggcagaacctgtttcgcgaccgcgagggagaggagcccgaggagatgcgggatcgaaagttccacgcagggcgcgagctgcggcatggcctgaatcgcgagcggttgctgcgcgaggaggactttgagcccgacgcgcgaaccgggattagtcccgcgcgcgcacacgtggcggccgccgacctggtaaccgcatacgagcagacggtgaaccaggagattaactttcaaaaaagctttaacaaccacgtgcgtacgcttgtggcgcgcgaggaggtggctataggactgatgcatctgtgggactttgtaagcgcgctggagcaaaacccaaatagcaagccgctcatggcgcagctgttccttatagtgcagcacagcagggacaacgaggcattcagggatgcgctgctaaacatagtagagcccgagggccgctggctgctcgatttgataaacatcctgcagagcatagtggtgcaggagcgcagcttgagcctggctgacaaggtggccgccatcaactattccatgcttagcctgggcaagttttacgcccgcaagatataccataccccttacgttcccatagacaaggaggtaaagatcgaggggttctacatgcgcatggcgctgaaggtgcttaccttgagcgacgacctgggcgtttatcgcaacgagcgcatccacaaggccgtgagcgtgagccggcggcgcgagctcagcgaccgcgagctgatgcacagcctgcaaagggccctggctggcacgggcagcggcgatagagaggccgagtcctactttgacgcgggcgctgacctgcgctgggccccaagccgacgcgccctggaggcagctggggccggacctgggctggcggtggcacccgcgcgcgctggcaacgtcggcggcgtggaggaatatgacgaggacgatgagtacgagccagaggacggcgagtactaagcggtgatgtttctgatcagatgatgcaagacgcaacggacccggcggtgcgggcggcgctgcagagccagccgtccggccttaactccacggacgactggcgccaggtcatggaccgcatcatgtcgctgactgcgcgcaatcctgacgcgttccggcagcagccgcaggccaaccggctctccgcaattctggaagcggtggtcccggcgcgcgcaaaccccacgcacgagaaggtgctggcgatcgtaaacgcgctggccgaaaacagggccatccggcccgacgaggccggcctggtctacgacgcgctgcttcagcgcgtggctcgttacaacagcggcaacgtgcagaccaacctggaccggctggtgggggatgtgcgcgaggccgtggcgcagcgtgagcgcgcgcagcagcagggcaacctgggctccatggttgcactaaacgccttcctgagtacacagcccgccaacgtgccgcggggacaggaggactacaccaactttgtgagcgcactgcggctaatggtgactgagacaccgcaaagtgaggtgtaccagtctgggccagactattttttccagaccagtagacaaggcctgcagaccgtaaacctgagccaggctttcaaaaacttgcaggggctgtggggggtgcgggctcccacaggcgaccgcgcgaccgtgtctagcttgctgacgcccaactcgcgcctgttgctgctgctaatagcgcccttcacggacagtggcagcgtgtcccgggacacatacctaggtcacttgctgacactgtaccgcgaggccataggtcaggcgcatgtggacgagcatactttccaggagattacaagtgtcagccgcgcgctggggcaggaggacacgggcagcctggaggcaaccctaaactacctgctgaccaaccggcggcagaagatcccctcgttgcacagtttaaacagcgaggaggagcgcattttgcgctacgtgcagcagagcgtgagccttaacctgatgcgcgacggggtaacgcccagcgtggcgctggacatgaccgcgcgcaacatggaaccgggcatgtatgcctcaaaccggccgtttatcaaccgcctaatggactacttgcatcgcgcggccgccgtgaaccccgagtatttcaccaatgccatcttgaacccgcactggctaccgccccctggtttctacaccgggggattcgaggtgcccgagggtaacgatggattcctctgggacgacatagacgacagcgtgttttccccgcaaccgcagaccctgctagagttgcaacagcgcgagcaggcagaggcggcgctgcgaaaggaaagcttccgcaggccaagcagcttgtccgatctaggcgctgcggccccgcggtcagatgctagtagcccatttccaagcttgatagggtctcttaccagcactcgcaccacccgcccgcgcctgctgggcgaggaggagtacctaaacaactcgctgctgcagccgcagcgcgaaaaaaacctgcctccggcatttcccaacaacgggatagagagcctagtggacaagatgagtagatggaagacgtacgcgcaggagcacagggacgtgccaggcccgcgcccgcccacccgtcgtcaaaggcacgaccgtcagcggggtctggtgtgggaggacgatgactcggcagacgacagcagcgtcctggatttgggagggagtggcaacccgtttgcgcaccttcgccccaggctggggagaatgttttaaaaaaaaaaaagcatgatgcaaaataaaaaactcaccaaggccatggcaccgagcgttggttttcttgtattccccttagtatgcggcgcgcggcgatgtatgaggaaggtcctcctccctcctacgagagtgtggtgagcgcggcgccagtggcggcggcgctgggttctcccttcgatgctcccctggacccgccgtttgtgcctccgcggtacctgcggcctaccggggggagaaacagcatccgttactctgagttggcacccctattcgacaccacccgtgtgtacctggtggacaacaagtcaacggatgtggcatccctgaactaccagaacgaccacagcaactttctgaccacggtcattcaaaacaatgactacagcccgggggaggcaagcacacagaccatcaatcttgacgaccggtcgcactggggcggcgacctgaaaaccatcctgcataccaacatgccaaatgtgaacgagttcatgtttaccaataagtttaaggcgcgggtgatggtgtcgcgcttgcctactaaggacaatcaggtggagctgaaatacgagtgggtggagttcacgctgcccgagggcaactactccgagaccatgaccatagaccttatgaacaacgcgatcgtggagcactacttgaaagtgggcagacagaacggggttctggaaagcgacatcggggtaaagtttgacacccgcaacttcagactggggtttgaccccgtcactggtcttgtcatgcctggggtatatacaaacgaagccttccatccagacatcattttgctgccaggatgcggggtggacttcacccacagccgcctgagcaacttgttgggcatccgcaagcggcaacccttccaggagggctttaggatcacctacgatgatctggagggtggtaacattcccgcactgttggatgtggacgcctaccaggcgagcttgaaagatgacaccgaacagggcgggggtggcgcaggcggcagcaacagcagtggcagcggcgcggaagagaactccaacgcggcagccgcggcaatgcagccggtggaggacatgaacgatcatgccattcgcggcgacacctttgccacacgggctgaggagaagcgcgctgaggccgaagcagcggccgaagctgccgcccccgctgcgcaacccgaggtcgagaagcctcagaagaaaccggtgatcaaacccctgacagaggacagcaagaaacgcagttacaacctaataagcaatgacagcaccttcacccagtaccgcagctggtaccttgcatacaactacggcgaccctcagaccggaatccgctcatggaccctgctttgcactcctgacgtaacctgcggctcggagcaggtctactggtcgttgccagacatgatgcaagaccccgtgaccttccgctccacgcgccagatcagcaactttccggtggtgggcgccgagctgttgcccgtgcactccaagagcttctacaacgaccaggccgtctactcccaactcatccgccagtttacctctctgacccacgtgttcaatcgctttcccgagaaccagattttggcgcgcccgccagcccccaccatcaccaccgtcagtgaaaacgttcctgctctcacagatcacgggacgctaccgctgcgcaacagcatcggaggagtccagcgagtgaccattactgacgccagacgccgcacctgcccctacgtttacaaggccctgggcatagtctcgccgcgcgtcctatcgagccgcactttttgagcaagcatgtccatccttatatcgcccagcaataacacaggctggggcctgcgcttcccaagcaagatgtttggcggggccaagaagcgctccgaccaacacccagtgcgcgtgcgcgggcactaccgcgcgccctggggcgcgcacaaacgcggccgcactgggcgcaccaccgtcgatgacgccatcgacgcggtggtggaggaggcgcgcaactacacgcccacgccgccaccagtgtccacagtggacgcggccattcagaccgtggtgcgcggagcccggcgctatgctaaaatgaagagacggcggaggcgcgtagcacgtcgccaccgccgccgacccggcactgccgcccaacgcgcggcggcggccctgcttaaccgcgcacgtcgcaccggccgacgggcggccatgcgggccgctcgaaggctggccgcgggtattgtcactgtgccccccaggtccaggcgacgagcggccgccgcagcagccgcggccattagtgctatgactcagggtcgcaggggcaacgtgtattgggtgcgcgactcggttagcggcctgcgcgtgcccgtgcgcacccgccccccgcgcaactagattgcaagaaaaaactacttagactcgtactgttgtatgtatccagcggcggcggcgcgcaacgaagctatgtccaagcgcaaaatcaaagaagagatgctccaggtcatcgcgccggagatctatggccccccgaagaaggaagagcaggattacaagccccgaaagctaaagcgggtcaaaaagaaaaagaaagatgatgatgatgaacttgacgacgaggtggaactgctgcacgctaccgcgcccaggcgacgggtacagtggaaaggtcgacgcgtaaaacgtgttttgcgacccggcaccaccgtagtctttacgcccggtgagcgctccacccgcacctacaagcgcgtgtatgatgaggtgtacggcgacgaggacctgcttgagcaggccaacgagcgcctcggggagtttgcctacggaaagcggcataaggacatgctggcgttgccgctggacgagggcaacccaacacctagcctaaagcccgtaacactgcagcaggtgctgcccgcgcttgcaccgtccgaagaaaagcgcggcctaaagcgcgagtctggtgacttggcacccaccgtgcagctgatggtacccaagcgccagcgactggaagatgtcttggaaaaaatgaccgtggaacctgggctggagcccgaggtccgcgtgcggccaatcaagcaggtggcgccgggactgggcgtgcagaccgtggacgttcagatacccactaccagtagcaccagtattgccaccgccacagagggcatggagacacaaacgtccccggttgcctcagcggtggcggatgccgcggtgcaggcggtcgctgcggccgcgtccaagacctctacggaggtgcaaacggacccgtggatgtttcgcgtttcagccccccggcgcccgcgccgttcgaggaagtacggcgccgccagcgcgctactgcccgaatatgccctacatccttccattgcgcctacccccggctatcgtggctacacctaccgccccagaagacgagcaactacccgacgccgaaccaccactggaacccgccgccgccgtcgccgtcgccagcccgtgctggccccgatttccgtgcgcagggtggctcgcgaaggaggcaggaccctggtgctgccaacagcgcgctaccaccccagcatcgtttaaaagccggtctttgtggttcttgcagatatggccctcacctgccgcctccgtttcccggtgccgggattccgaggaagaatgcaccgtaggaggggcatggccggccacggcctgacgggcggcatgcgtcgtgcgcaccaccggcggcggcgcgcgtcgcaccgtcgcatgcgcggcggtatcctgcccctccttattccactgatcgccgcggcgattggcgccgtgcccggaattgcatccgtggccttgcaggcgcagagacactgattaaaaacaagttgcatgtggaaaaatcaaaataaaaagtctggactctcacgctcgcttggtcctgtaactattttgtagaatggaagacatcaactttgcgtctctggccccgcgacacggctcgcgcccgttcatgggaaactggcaagatatcggcaccagcaatatgagcggtggcgccttcagctggggctcgctgtggagcggcattaaaaatttcggttccaccgttaagaactatggcagcaaggcctggaacagcagcacaggccagatgctgagggataagttgaaagagcaaaatttccaacaaaaggtggtagatggcctggcctctggcattagcggggtggtggacctggccaaccaggcagtgcaaaataagattaacagtaagcttgatccccgccctcccgtagaggagcctccaccggccgtggagacagtgtctccagaggggcgtggcgaaaagcgtccgcgccccgacagggaagaaactctggtgacgcaaatagacgagcctccctcgtacgaggaggcactaaagcaaggcctgcccaccacccgtcccatcgcgcccatggctaccggagtgctgggccagcacacacccgtaacgctggacctgcctccccccgccgacacccagcagaaacctgtgctgccaggcccgaccgccgttgttgtaacccgtcctagccgcgcgtccctgcgccgcgccgccagcggtccgcgatcgttgcggcccgtagccagtggcaactggcaaagcacactgaacagcatcgtgggtctgggggtgcaatccctgaagcgccgacgatgcttctgatagctaacgtgtcgtatgtgtgtcatgtatgcgtccatgtcgccgccagaggagctgctgagccgccgcgcgcccgctttccaagatggctaccccttcgatgatgccgcagtggtcttacatgcacatctcgggccaggacgcctcggagtacctgagccccgggctggtgcagtttgcccgcgccaccgagacgtacttcagcctgaataacaagtttagaaaccccacggtggcgcctacgcacgacgtgaccacagaccggtcccagcgtttgacgctgcggttcatccctgtggaccgtgaggatactgcgtactcgtacaaggcgcggttcaccctagctgtgggtgataaccgtgtgctggacatggcttccacgtactttgacatccgcggcgtgctggacaggggccctacttttaagccctactctggcactgcctacaacgccctggctcccaagggtgccccaaatccttgcgaatgggatgaagctgctactgctcttgaaataaacctagaagaagaggacgatgacaacgaagacgaagtagacgagcaagctgagcagcaaaaaactcacgtatttgggcaggcgccttattctggtataaatattacaaaggagggtattcaaataggtgtcgaaggtcaaacacctaaatatgccgataaaacatttcaacctgaacctcaaataggagaatctcagtggtacgaaacagaaattaatcatgcagctgggagagtcctaaaaaagactaccccaatgaaaccatgttacggttcatatgcaaaacccacaaatgaaaatggagggcaaggcattcttgtaaagcaacaaaatggaaagctagaaagtcaagtggaaatgcaatttttctcaactactgaggcagccgcaggcaatggtgataacttgactcctaaagtggtattgtacagtgaagatgtagatatagaaaccccagacactcatatttcttacatgcccactattaaggaaggtaactcacgagaactaatgggccaacaatctatgcccaacaggcctaattacattgcttttagggacaattttattggtctaatgtattacaacagcacgggtaatatgggtgttctggcgggccaagcatcgcagttgaatgctgttgtagatttgcaagacagaaacacagagctttcataccagcttttgcttgattccattggtgatagaaccaggtacttttctatgtggaatcaggctgttgacagctatgatccagatgttagaattattgaaaatcatggaactgaagatgaacttccaaattactgctttccactgggaggtgtgattaatacagagactcttaccaaggtaaaacctaaaacaggtcaggaaaatggatgggaaaaagatgctacagaattttcagataaaaatgaaataagagttggaaataattttgccatggaaatcaatctaaatgccaacctgtggagaaatttcctgtactccaacatagcgctgtatttgcccgacaagctaaagtacagtccttccaacgtaaaaatttctgataacccaaacacctacgactacatgaacaagcgagtggtggctcccgggctagtggactgctacattaaccttggagcacgctggtcccttgactatatggacaacgtcaacccatttaaccaccaccgcaatgctggcctgcgctaccgctcaatgttgctgggcaatggtcgctatgtgcccttccacatccaggtgcctcagaagttctttgccattaaaaacctccttctcctgccgggctcatacacctacgagtggaacttcaggaaggatgttaacatggttctgcagagctccctaggaaatgacctaagggttgacggagccagcattaagtttgatagcatttgcctttacgccaccttcttccccatggcccacaacaccgcctccacgcttgaggccatgcttagaaacgacaccaacgaccagtcctttaacgactatctctccgccgccaacatgctctaccctatacccgccaacgctaccaacgtgcccatatccatcccctcccgcaactgggcggctttccgcggctgggccttcacgcgccttaagactaaggaaaccccatcactgggctcgggctacgacccttattacacctactctggctctataccctacctagatggaaccttttacctcaaccacacctttaagaaggtggccattacctttgactcttctgtcagctggcctggcaatgaccgcctgcttacccccaacgagtttgaaattaagcgctcagttgacggggagggttacaacgttgcccagtgtaacatgaccaaagactggttcctggtacaaatgctagctaactataacattggctaccagggcttctatatcccagagagctacaaggaccgcatgtactccttctttagaaacttccagcccatgagccgtcaggtggtggatgatactaaatacaaggactaccaacaggtgggcatcctacaccaacacaacaactctggatttgttggctaccttgcccccaccatgcgcgaaggacaggcctaccctgctaacttcccctatccgcttataggcaagaccgcagttgacagcattacccagaaaaagtttctttgcgatcgcaccctttggcgcatcccattctccagtaactttatgtccatgggcgcactcacagacctgggccaaaaccttctctacgccaactccgcccacgcgctagacatgacttttgaggtggatcccatggacgagcccacccttctttatgttttgtttgaagtctttgacgtggtccgtgtgcaccagccgcaccgcggcgtcatcgaaaccgtgtacctgcgcacgcccttctcggccggcaacgccacaacataaagaagcaagcaacatcaacaacagctgccgccatgggctccagtgagcaggaactgaaagccattgtcaaagatcttggttgtgggccatattttttgggcacctatgacaagcgctttccaggctttgtttctccacacaagctcgcctgcgccatagtcaatacggccggtcgcgagactgggggcgtacactggatggcctttgcctggaacccgcactcaaaaacatgctacctctttgagccctttggcttttctgaccagcgactcaagcaggtttaccagtttgagtacgagtcactcctgcgccgtagcgccattgcttcttcccccgaccgctgtataacgctggaaaagtccacccaaagcgtacaggggcccaactcggccgcctgtggactattctgctgcatgtttctccacgcctttgccaactggccccaaactcccatggatcacaaccccaccatgaaccttattaccggggtacccaactccatgctcaacagtccccaggtacagcccaccctgcgtcgcaaccaggaacagctctacagcttcctggagcgccactcgccctacttccgcagccacagtgcgcagattaggagcgccacttctttttgtcacttgaaaaacatgtaaaaataatgtactagagacactttcaataaaggcaaatgcttttatttgtacactctcgggtgattatttacccccacccttgccgtctgcgccgtttaaaaatcaaaggggttctgccgcgcatcgctatgcgccactggcagggacacgttgcgatactggtgtttagtgctccacttaaactcaggcacaaccatccgcggcagctcggtgaagttttcactccacaggctgcgcaccatcaccaacgcgtttagcaggtcgggcgccgatatcttgaagtcgcagttggggcctccgccctgcgcgcgcgagttgcgatacacagggttgcagcactggaacactatcagcgccgggtggtgcacgctggccagcacgctcttgtcggagatcagatccgcgtccaggtcctccgcgttgctcagggcgaacggagtcaactttggtagctgccttcccaaaaagggcgcgtgcccaggctttgagttgcactcgcaccgtagtggcatcaaaaggtgaccgtgcccggtctgggcgttaggatacagcgcctgcataaaagccttgatctgcttaaaagccacctgagcctttgcgccttcagagaagaacatgccgcaagacttgccggaaaactgattggccggacaggccgcgtcgtgcacgcagcaccttgcgtcggtgttggagatctgcaccacatttcggccccaccggttcttcacgatcttggccttgctagactgctccttcagcgcgcgctgcccgttttcgctcgtcacatccatttcaatcacgtgctccttatttatcataatgcttccgtgtagacacttaagctcgccttcgatctcagcgcagcggtgcagccacaacgcgcagcccgtgggctcgtgatgcttgtaggtcacctctgcaaacgactgcaggtacgcctgcaggaatcgccccatcatcgtcacaaaggtcttgttgctggtgaaggtcagctgcaacccgcggtgctcctcgttcagccaggtcttgcatacggccgccagagcttccacttggtcaggcagtagtttgaagttcgcctttagatcgttatccacgtggtacttgtccatcagcgcgcgcgcagcctccatgcccttctcccacgcagacacgatcggcacactcagcgggttcatcaccgtaatttcactttccgcttcgctgggctcttcctcttcctcttgcgtccgcataccacgcgccactgggtcgtcttcattcagccgccgcactgtgcgcttacctcctttgccatgcttgattagcaccggtgggttgctgaaacccaccatttgtagcgccacatcttctctttcttcctcgctgtccacgattacctctggtgatggcgggcgctcgggcttgggagaagggcgcttctttttcttcttgggcgcaatggccaaatccgccgccgaggtcgatggccgcgggctgggtgtgcgcggcaccagcgcgtcttgtgatgagtcttcctcgtcctcggactcgatacgccgcctcatccgcttttttgggggcgcccggggaggcggcggcgacggggacggggacgacacgtcctccatggttgggggacgtcgcgccgcaccgcgtccgcgctcgggggtggtttcgcgctgctcctcttcccgactggccatttccttctcctataggcagaaaaagatcatggagtcagtcgagaagaaggacagcctaaccgccccctctgagttcgccaccaccgcctccaccgatgccgccaacgcgcctaccaccttccccgtcgaggcacccccgcttgaggaggaggaagtgattatcgagcaggacccaggttttgtaagcgaagacgacgaggaccgctcagtaccaacagaggataaaaagcaagaccaggacaacgcagaggcaaacgaggaacaagtcgggcggggggacgaaaggcatggcgactacctagatgtgggagacgacgtgctgttgaagcatctgcagcgccagtgcgccattatctgcgacgcgttgcaagagcgcagcgatgtgcccctcgccatagcggatgtcagccttgcctacgaacgccacctattctcaccgcgcgtaccccccaaacgccaagaaaacggcacatgcgagcccaacccgcgcctcaacttctaccccgtatttgccgtgccagaggtgcttgccacctatcacatctttttccaaaactgcaagatacccctatcctgccgtgccaaccgcagccgagcggacaagcagctggccttgcggcagggcgctgtcatacctgatatcgcctcgctcaacgaagtgccaaaaatctttgagggtcttggacgcgacgagaagcgcgcggcaaacgctctgcaacaggaaaacagcgaaaatgaaagtcactctggagtgttggtggaactcgagggtgacaacgcgcgcctagccgtactaaaacgcagcatcgaggtcacccactttgcctacccggcacttaacctaccccccaaggtcatgagcacagtcatgagtgagctgatcgtgcgccgtgcgcagcccctggagagggatgcaaatttgcaagaacaaacagaggagggcctacccgcagttggcgacgagcagctagcgcgctggcttcaaacgcgcgagcctgccgacttggaggagcgacgcaaactaatgatggccgcagtgctcgttaccgtggagcttgagtgcatgcagcggttctttgctgacccggagatgcagcgcaagctagaggaaacattgcactacacctttcgacagggctacgtacgccaggcctgcaagatctccaacgtggagctctgcaacctggtctcctaccttggaattttgcacgaaaaccgccttgggcaaaacgtgcttcattccacgctcaagggcgaggcgcgccgcgactacgtccgcgactgcgtttacttatttctatgctacacctggcagacggccatgggcgtttggcagcagtgcttggaggagtgcaacctcaaggagctgcagaaactgctaaagcaaaacttgaaggacctatggacggccttcaacgagcgctccgtggccgcgcacctggcggacatcattttccccgaacgcctgcttaaaaccctgcaacagggtctgccagacttcaccagtcaaagcatgttgcagaactttaggaactttatcctagagcgctcaggaatcttgcccgccacctgctgtgcacttcctagcgactttgtgcccattaagtaccgcgaatgccctccgccgctttggggccactgctaccttctgcagctagccaactaccttgcctaccactctgacataatggaagacgtgagcggtgacggtctactggagtgtcactgtcgctgcaacctatgcaccccgcaccgctccctggtttgcaattcgcagctgcttaacgaaagtcaaattatcggtacctttgagctgcagggtccctcgcctgacgaaaagtccgcggctccggggttgaaactcactccggggctgtggacgtcggcttaccttcgcaaatttgtacctgaggactaccacgcccacgagattaggttctacgaagaccaatcccgcccgcctaatgcggagcttaccgcctgcgtcattacccagggccacattcttggccaattgcaagccatcaacaaagcccgccaagagtttctgctacgaaagggacggggggtttacttggacccccagtccggcgaggagctcaacccaatccccccgccgccgcagccctatcagcagcagccgcgggcccttgcttcccaggatggcacccaaaaagaagctgcagctgccgccgccacccacggacgaggaggaatactgggacagtcaggcagaggaggttttggacgaggaggaggaggacatgatggaagactgggagagcctagacgaggaagcttccgaggtcgaagaggtgtcagacgaaacaccgtcaccctcggtcgcattcccctcgccggcgccccagaaatcggcaaccggttccagcatggctacaacctccgctcctcaggcgccgccggcactgcccgttcgccgacccaaccgtagatgggacaccactggaaccagggccggtaagtccaagcagccgccgccgttagcccaagagcaacaacagcgccaaggctaccgctcatggcgcgggcacaagaacgccatagttgcttgcttgcaagactgtgggggcaacatctccttcgcccgccgctttcttctctaccatcacggcgtggccttcccccgtaacatcctgcattactaccgtcatctctacagcccatactgcaccggcggcagcggcagcaacagcagcggccacacagaagcaaaggcgaccggatagcaagactctgacaaagcccaagaaatccacagcggcggcagcagcaggaggaggagcgctgcgtctggcgcccaacgaacccgtatcgacccgcgagcttagaaacaggatttttcccactctgtatgctatatttcaacagagcaggggccaagaacaagagctgaaaataaaaaacaggtctctgcgatccctcacccgcagctgcctgtatcacaaaagcgaagatcagcttcggcgcacgctggaagacgcggaggctctcttcagtaaatactgcgcgctgactcttaaggactagtttcgcgccctttctcaaatttaagcgcgaaaactacgtcatctccagcggccacacccggcgccagcacctgttgtcagcgccattatgagcaaggaaattcccacgccctacatgtggagttaccagccacaaatgggacttgcggctggagctgcccaagactactcaacccgaataaactacatgagcgcgggaccccacatgatatcccgggtcaacggaatacgcgcccaccgaaaccgaattctcctggaacaggcggctattaccaccacacctcgtaataaccttaatccccgtagttggcccgctgccctggtgtaccaggaaagtcccgctcccaccactgtggtacttcccagagacgcccaggccgaagttcagatgactaactcaggggcgcagcttgcgggcggctttcgtcacagggtgcggtcgcccgggcagggtataactcacctgacaatcagagggcgaggtattcagctcaacgacgagtcggtgagctcctcgcttggtctccgtccggacgggacatttcagatcggcggcgccggccgctcttcattcacgcctcgtcaggcaatcctaactctgcagacctcgtcctctgagccgcgctctggaggcattggaactctgcaatttattgaggagtttgtgccatcggtctactttaaccccttctcgggacctcccggccactatccggatcaatttattcctaactttgacgcggtaaaggactcggcggacggctacgactgaatgttaagtggagaggcagagcaactgcgcctgaaacacctggtccactgtcgccgccacaagtgctttgcccgcgactccggtgagttttgctactttgaattgcccgaggatcatatcgagggcccggcgcacggcgtccggcttaccgcccagggagagcttgcccgtagcctgattcgggagtttacccagcgccccctgctagttgagcgggacaggggaccctgtgttctcactgtgatttgcaactgtcctaaccctggattacatcaagatcctctagttaatgtcaggtcgcctaagtcgattaactagagtacccggggatcttattccctttaactaataaaaaaaaataataaagcatcacttacttaaaatcagttagcaaatttctgtccagtttattcagcagcacctccttgccctcctcccagctctggtattgcagcttcctcctggctgcaaactttctccacaatctaaatggaatgtcagtttcctcctgttcctgtccatccgcacccactatcttcatgttgttgcagatgaagcgcgcaagaccgtctgaagataccttcaaccccgtgtatccatatgacacggaaaccggtcctccaactgtgccttttcttactcctccctttgtatcccccaatgggtttcaagagagtccccctggggtactctctttgcgcctatccgaacctctagttacctccaatggcatgcttgcgctcaaaatgggcaacggcctctctctggacgaggccggcaaccttacctcccaaaatgtaaccactgtgagcccacctctcaaaaaaaccaagtcaaacataaacctggaaatatctgcacccctcacagttacctcagaagccctaactgtggctgccgccgcacctctaatggtcgcgggcaacacactcaccatgcaatcacaggccccgctaaccgtgcacgactccaaacttagcattgccacccaaggacccctcacagtgtcagaaggaaagctagccctgcaaacatcaggccccctcaccaccaccgatagcagtacccttactatcactgcctcaccccctctaactactgccactggtagcttgggcattgacttgaaagagcccatttatacacaaaatggaaaactaggactaaagtacggggctcctttgcatgtaacagacgacctaaacactttgaccgtagcaactggtccaggtgtgactattaataatacttccttgcaaactaaagttactggagccttgggttttgattcacaaggcaatatgcaacttaatgtagcaggaggactaaggattgattctcaaaacagacgccttatacttgatgttagttatccgtttgatgctcaaaaccaactaaatctaagactaggacagggccctctttttataaactcagcccacaacttggatattaactacaacaaaggcctttacttgtttacagcttcaaacaattccaaaaagcttgaggttaacctaagcactgccaaggggttgatgtttgacgctacagccatagccattaatgcaggagatgggcttgaatttggttcacctaatgcaccaaacacaaatcccctcaaaacaaaaattggccatggcctagaatttgattcaaacaaggctatggttcctaaactaggaactggccttagttttgacagcacaggtgccattacagtaggaaacaaaaataatgataagctaactttgtggaccggaataaaccctccacctaactgtcaaattgtggaaaacactaatacaaatgatggcaaacttactttagtattagtaaaaaatggagggcttgttaatggctacgtgtctctagttggtgtatcagacactgtgaaccaaatgttcacacaaaagacagcaaacatccaattaagattatattttgactcttctggaaatctattaactgaggaatcagacttaaaaattccacttaaaaataaatcttctacagcgaccagtgaaactgtagccagcagcaaagcctttatgccaagtactacagcttatcccttcaacaccactactagggatagtgaaaactacattcatggaatatgttactacatgactagttatgatagaagtctatttcccttgaacatttctataatgctaaacagccgtatgatttcttccaatgttgcctatgccatacaatttgaatggaatctaaatgcaagtgaatctccagaaagcaacatagctacgctgaccacatccccctttttcttttcttacattacagaagacgacaactaaagaatcgtttgtgttatgtttcaacgtgtttatttttcaattgcagaaaatttcaagtcatttttcattcagtagtatagccccaccaccacatagcttatacagatcaccgtaccttaatcaaacgtttttttttttattccaaaagattatccaaaacctcaaaatgaagatctattaagtgaacgcgctcccctccggtggcgtggtcaaactctacagccaaagaacagataatggcatttgtaagatgttgcacaatggcttccaaaaggcaaacggccctcacgtccaagtggacgtaaaggctaaacccttcagggtgaatctcctctataaacattccagcaccttcaaccatgcccaaataattctcatctcgccaccttctcaatatatctctaagcaaatcccgaatattaagtccggccattgtaaaaatctgctccagagcgccctccaccttcagcctcaagcagcgaatcatgattgcaaaaattcaggttcctcacagacctgtataagattcaaaagcggaacattaacaaaaataccgcgatcccgtaggtcccttcgcagggccagctgaacataatcgtgcaggtctgcacggaccagcgcggccacttccccgccaggaaccatgacaaaagaacccacactgattatgacacgcatactcggagctatgctaaccagcgtagccccgatgtaagcttgttgcatgggcggcgatataaaatgcaaggtgctgctcaaaaaatcaggcaaagcctcgcgcaaaaaagaaagcacatcgtagtcatgctcatgcagataaaggcaggtaagctccggaaccaccacagaaaaagacaccatttttctctcaaacatgtctgcgggtttctgcataaacacaaaataaaataacaaaaaaacatttaaacattagaagcctgtcttacaacaggaaaaacaacccttataagcataagacggactacggccatgccggcgtgaccgtaaaaaaactggtcaccgtgattaaaaagcaccaccgacagctcctcggtcatgtccggagtcataatgtaagactcggtaaacacatcaggttgattcacatcggtcagtgctaaaaagcgaccgaaatagcccgggggaatacatacccgcaggcgtagagacaacattacagcccccataggaggtataacaaaattaataggagagaaaaacacataaacacctgaaaaaccctcctgcctaggcaaaatagcaccctcccgctccagaacaacatacagcgcttccacagcggcagccataacagtcagccttaccagtaaaaaagaaaacctattaaaaaaacaccactcgacacggcaccagctcaatcagtcacagtgtaaaaaagggccaagtgcagagcgagtatatataggactaaaaaatgacgtaacggttaaagtccacaaaaaacacccagaaaaccgcacgcgaacctacgcccagaaacgaaagccaaaaaacccacaacttcctcaaatcgtcacttccgttttcccacgttacgtcacttcccattttaagaaaactacaattcccaacacatacaagttactccgccctaaaacctacgtcacccgccccgttcccacgccccgcgccacgtcacaaactccaccccctcattatcatattggcttcaatccaaaataaggtatattattgatgatg

SEQ ID NO: 4 - DNA, 33075 bp, Artificial Sequence
  pAdk35-E4dl355
ttaattaagaattaattcgatcctgaatggcgaatggacgcgccctgtagcggcgcattaagcgcggcgggtgtggtggttacgcgcagcgtgaccgctacacttgccagcgccctagcgcccgctcctttcgctttcttcccttcctttctcgccacgttcgccggctttccccgtcaagctctaaatcgggggctccctttagggttccgatttagtgctttacggcacctcgaccccaaaaaacttgattagggtgatggttcacgtagtgggccatcgccctgatagacggtttttcgccctttgacgttggagtccacgttctttaatagtggactcttgttccaaactggaacaacactcaaccctatctcggtctattcttttgatttataagggattttgccgatttcggcctattggttaaaaaatgagctgatttaacaaaaattttaacaaaattcagaagaactcgtcaagaaggcgatagaaggcgatgcgctgcgaatcgggagcggcgataccgtaaagcacgaggaagcggtcagcccattcgccgccaagctcttcagcaatatcacgggtagccaacgctatgtcctgatagcggtccgccacacccagccggccacagtcgatgaatccagaaaagcggccattttccaccatgatattcggcaagcaggcatcgccatgggtcacgacgagatcctcgccgtcgggcatgctcgccttgagcctggcgaacagttcggctggcgcgagcccctgatgctcttcgtccagatcatcctgatcgacaagaccggcttccatccgagtacgtgctcgctcgatgcgatgtttcgcttggtggtcgaatgggcaggtagccggatcaagcgtatgcagccgccgcattgcatcagccatgatggatactttctcggcaggagcaaggtgagatgacaggagatcctgccccggcacttcgcccaatagcagccagtcccttcccgcttcagtgacaacgtcgagcacagctgcgcaaggaacgcccgtcgtggccagccacgatagccgcgctgcctcgtcttgcagttcattcagggcaccggacaggtcggtcttgacaaaaagaaccgggcgcccctgcgctgacagccggaacacggcggcatcagagcagccgattgtctgttgtgcccagtcatagccgaatagcctctccacccaagcggccggagaacctgcgtgcaatccatcttgttcaatcatgcgaaacgatcctcatcctgtctcttgatcagagcttgatcccctgcgccatcagatccttggcggcaagaaagccatccagtttactttgcagggcttcccaaccttaccagagggcgccccagctggcaattccggttcgcttgctgtccataaaaccgcccagtctagctatcgccatgtaagcccactgcaagctacctgctttctctttgcgcttgcgttttcccttgtccagatagcccagtagctgacattcatccggggtcagcaccgtttctgcggactggctttctacgtgaaaaggatctaggtgaagatcctttttgataatctcatggctgcagcaatggcaacaacgttgcgcaaactattaactggcgaactacttactctagcttcccggcaacaattaatagactggatggaggcggataaagttgcaggaccacttctgcgctcggcccttccggctggctggtttattgctgataaatctggagccggtgagcgtgggtctcgcggtatcattgcagcactggggccagatggtaagccctcccgtatcgtagttatctacacgacggggagtcaggcaactatggatgaacgaaatagacagatcgctgagataggtgcctcactgattaagcattggtaactgtcagaccaagtttactcatatatactttagattgatttaaaacttcatttttaatttaaaaggatctaggtgaagatcctttttgataatctcatgaccaaaatcccttaacgtgagttttcgttccactgagcgtcagaccccgtagaaaagatcaaaggatcttcttgagatcctttttttctgcgcgtaatctgctgcttgcaaacaaaaaaaccaccgctaccagcggtggtttgtttgccggatcaagagctaccaactctttttccgaaggtaactggcttcagcagagcgcagataccaaatactgtccttctagtgtagccgtagttaggccaccacttcaagaactctgtagcaccgcctacatacctcgctctgctaatcctgttaccagtggctgctgccagtggcgataagtcgtgtcttaccgggttggactcaagacgatagttaccggataaggcgcagcggtcgggctgaacggggggttcgtgcacacagcccagcttggagcgaacgacctacaccgaactgagatacctacagcgtgagctatgagaaagcgccacgcttcccgaagggagaaaggcggacaggtatccggtaagcggcagggtcggaacaggagagcgcacgagggagcttccagggggaaacgcctggtatctttatagtcctgtcgggtttcgccacctctgacttgagcgtcgatttttgtgatgctcgtcaggggggcggagcctatggaaaaacgccagcaacgcggcctttttacggttcctggccttttgctggccttttgctcacatgttctttcctgcgttatcccctgattctgtggataaccgtattaccgcctttgagtgagctgataccgctcgccgcagccgaacgaccgagcgcagcgagtcagtgagcgaggaagcggaagagcgcctgatgcggtattttctccttacgcatctgtgcggtatttcacaccgcatatggatccatgcatgttaattaacatcatcaataatataccttattttggattgaagccaatatgataatgagggggtggagtttgtgacgtggcgcggggcgtgggaacggggcgggtgacgtagtagtgtggcggaagtgtgatgttgcaagtgtggcggaacacatgtaagcgacggatgtggcaaaagtgacgtttttggtgtgcgccggtgtacacaggaagtgacaattttcgcgcggttttaggcggatgttgtagtaaatttgggcgtaaccgagtaagatttggccattttcgcgggaaaactgaataagaggaagtgaaatctgaataattttgtgttactcatagcgcgtaataatttaaattgggcgtggcttaagggtgggaaagaatatataaggtgggggtcttatgtagttttgtatctgttttgcagcagccgccgccgccatgagcaccaactcgtttgatggaagcattgtgagctcatatttgacaacgcgcatgcccccatgggccggggtgcgtcagaatgtgatgggctccagcattgatggtcgccccgtcctgcccgcaaactctactaccttgacctacgagaccgtgtctggaacgccgttggagactgcagcctccgccgccgcttcagccgctgcagccaccgcccgcgggattgtgactgactttgctttcctgagcccgcttgcaagcagtgcagcttcccgttcatccgcccgcgatgacaagttgacggctcttttggcacaattggattctttgacccgggaacttaatgtcgtttctcagcagctgttggatctgcgccagcaggtttctgccctgaaggcttcctcccctcccaatgcggtttaaaacataaataaaaaaccagactctgtttggatttggatcaagcaagtgtcttgctgtctttatttaggggttttgcgcgcgcggtaggcccgggaccagcggtctcggtcgttgagggtcctgtgtattttttccaggacgtggtaaaggtgactctggatgttcagatacatgggcataagcccgtctctggggtggaggtagcaccactgcagagcttcatgctgcggggtggtgttgtagatgatccagtcgtagcaggagcgctgggcgtggtgcctaaaaatgtctttcagtagcaagctgattgccaggggcaggcccttggtgtaagtgtttacaaagcggttaagctgggatgggtgcatacgtggggatatgagatgcatcttggactgtatttttaggttggctatgttcccagccatatccctccggggattcatgttgtgcagaaccaccagcacagtgtatccggtgcacttgggaaatttgtcatgtagcttagaaggaaatgcgtggaagaacttggagacgcccttgtgacctccaagattttccatgcattcgtccataatgatggcaatgggcccacgggcggcggcctgggcgaagatatttctgggatcactaacgtcatagttgtgttccaggatgagatcgtcataggccatttttacaaagcgcgggcggagggtgccagactgcggtataatggttccatccggcccaggggcgtagttaccctcacagatttgcatttcccacgctttgagttcagatggggggatcatgtctacctgcggggcgatgaagaaaacggtttccggggtaggggagatcagctgggaagaaagcaggttcctgagcagctgcgacttaccgcagccggtgggcccgtaaatcacacctattaccgggtgcaactggtagttaagagagctgcagctgccgtcatccctgagcaggggggccacttcgttaagcatgtccctgactcgcatgttttccctgaccaaatccgccagaaggcgctcgccgcccagcgatagcagttcttgcaaggaagcaaagtttttcaacggtttgagaccgtccgccgtaggcatgcttttgagcgtttgaccaagcagttccaggcggtcccacagctcggtcacctgctctacggcatctcgatccagcatatctcctcgtttcgcgggttggggcggctttcgctgtacggcagtagtcggtgctcgtccagacgggccagggtcatgtctttccacgggcgcagggtcctcgtcagcgtagtctgggtcacggtgaaggggtgcgctccgggctgcgcgctggccagggtgcgcttgaggctggtcctgctggtgctgaagcgctgccggtcttcgccctgcgcgtcggccaggtagcatttgaccatggtgtcatagtccagcccctccgcggcgtggcccttggcgcgcagcttgcccttggaggaggcgccgcacgaggggcagtgcagacttttgagggcgtagagcttgggcgcgagaaataccgattccggggagtaggcatccgcgccgcaggccccgcagacggtctcgcattccacgagccaggtgagctctggccgttcggggtcaaaaaccaggtttcccccatgctttttgatgcgtttcttacctctggtttccatgagccggtgtccacgctcggtgacgaaaaggctgtccgtgtccccgtatacagacttgagaggcctgtcctcgagcggtgttccgcggtcctcctcgtatagaaactcggaccactctgagacaaaggctcgcgtccaggccagcacgaaggaggctaagtgggaggggtagcggtcgttgtccactagggggtccactcgctccagggtgtgaagacacatgtcgccctcttcggcatcaaggaaggtgattggtttgtaggtgtaggccacgtgaccgggtgttcctgaaggggggctataaaagggggtgggggcgcgttcgtcctcactctcttccgcatcgctgtctgcgagggccagctgttggggtgagtactccctctgaaaagcgggcatgacttctgcgctaagattgtcagtttccaaaaacgaggaggatttgatattcacctggcccgcggtgatgcctttgagggtggccgcatccatctggtcagaaaagacaatctttttgttgtcaagcttggtggcaaacgacccgtagagggcgttggacagcaacttggcgatggagcgcagggtttggtttttgtcgcgatcggcgcgctccttggccgcgatgtttagctgcacgtattcgcgcgcaacgcaccgccattcgggaaagacggtggtgcgctcgtcgggcaccaggtgcacgcgccaaccgcggttgtgcagggtgacaaggtcaacgctggtggctacctctccgcgtaggcgctcgttggtccagcagaggcggccgcccttgcgcgagcagaatggcggtagggggtctagctgcgtctcgtccggggggtctgcgtccacggtaaagaccccgggcagcaggcgcgcgtcgaagtagtctatcttgcatccttgcaagtctagcgcctgctgccatgcgcgggcggcaagcgcgcgctcgtatgggttgagtgggggaccccatggcatggggtgggtgagcgcggaggcgtacatgccgcaaatgtcgtaaacgtagaggggctctctgagtattccaagatatgtagggtagcatcttccaccgcggatgctggcgcgcacgtaatcgtatagttcgtgcgagggagcgaggaggtcgggaccgaggttgctacgggcgggctgctctgctcggaagactatctgcctgaagatggcatgtgagttggatgatatggttggacgctggaagacgttgaagctggcgtctgtgagacctaccgcgtcacgcacgaaggaggcgtaggagtcgcgcagcttgttgaccagctcggcggtgacctgcacgtctagggcgcagtagtccagggtttccttgatgatgtcatacttatcctgtcccttttttttccacagctcgcggttgaggacaaactcttcgcggtctttccagtactcttggatcggaaacccgtcggcctccgaacggtaagagcctagcatgtagaactggttgacggcctggtaggcgcagcatcccttttctacgggtagcgcgtatgcctgcgcggccttccggagcgaggtgtgggtgagcgcaaaggtgtccctgaccatgactttgaggtactggtatttgaagtcagtgtcgtcgcatccgccctgctcccagagcaaaaagtccgtgcgctttttggaacgcggatttggcagggcgaaggtgacatcgttgaagagtatctttcccgcgcgaggcataaagttgcgtgtgatgcggaagggtcccggcacctcggaacggttgttaattacctgggcggcgagcacgatctcgtcaaagccgttgatgttgtggcccacaatgtaaagttccaagaagcgcgggatgcccttgatggaaggcaattttttaagttcctcgtaggtgagctcttcaggggagctgagcccgtgctctgaaagggcccagtctgcaagatgagggttggaagcgacgaatgagctccacaggtcacgggccattagcatttgcaggtggtcgcgaaaggtcctaaactggcgacctatggccattttttctggggtgatgcagtagaaggtaagcgggtcttgttcccagcggtcccatccaaggttcgcggctaggtctcgcgcggcagtcactagaggctcatctccgccgaacttcatgaccagcatgaagggcacgagctgcttcccaaaggcccccatccaagtataggtctctacatcgtaggtgacaaagagacgctcggtgcgaggatgcgagccgatcgggaagaactggatctcccgccaccaattggaggagtggctattgatgtggtgaaagtagaagtccctgcgacgggccgaacactcgtgctggcttttgtaaaaacgtgcgcagtactggcagcggtgcacgggctgtacatcctgcacgaggttgacctgacgaccgcgcacaaggaagcagagtgggaatttgagcccctcgcctggcgggtttggctggtggtcttctacttcggctgcttgtccttgaccgtctggctgctcgaggggagttacggtggatcggaccaccacgccgcgcgagcccaaagtccagatgtccgcgcgcggcggtcggagcttgatgacaacatcgcgcagatgggagctgtccatggtctggagctcccgcggcgtcaggtcaggcgggagctcctgcaggtttacctcgcatagacgggtcagggcgcgggctagatccaggtgatacctaatttccaggggctggttggtggcggcgtcgatggcttgcaagaggccgcatccccgcggcgcgactacggtaccgcgcggcgggcggtgggccgcgggggtgtccttggatgatgcatctaaaagcggtgacgcgggcgagcccccggaggtagggggggctccggacccgccgggagagggggcaggggcacgtcggcgccgcgcgcgggcaggagctggtgctgcgcgcgtaggttgctggcgaacgcgacgacgcggcggttgatctcctgaatctggcgcctctgcgtgaagacgacgggcccggtgagcttgaacctgaaagagagttcgacagaatcaatttcggtgtcgttgacggcggcctggcgcaaaatctcctgcacgtctcctgagttgtcttgataggcgatctcggccatgaactgctcgatctcttcctcctggagatctccgcgtccggctcgctccacggtggcggcgaggtcgttggaaatgcgggccatgagctgcgagaaggcgttgaggcctccctcgttccagacgcggctgtagaccacgcccccttcggcatcgcgggcgcgcatgaccacctgcgcgagattgagctccacgtgccgggcgaagacggcgtagtttcgcaggcgctgaaagaggtagttgagggtggtggcggtgtgttctgccacgaagaagtacataacccagcgtcgcaacgtggattcgttgatatcccccaaggcctcaaggcgctccatggcctcgtagaagtccacggcgaagttgaaaaactgggagttgcgcgccgacacggttaactcctcctccagaagacggatgagctcggcgacagtgtcgcgcacctcgcgctcaaaggctacaggggcctcttcttcttcttcaatctcctcttccataagggcctccccttcttcttcttctggcggcggtgggggaggggggacacggcggcgacgacggcgcaccgggaggcggtcgacaaagcgctcgatcatctccccgcggcgacggcgcatggtctcggtgacggcgcggccgttctcgcgggggcgcagttggaagacgccgcccgtcatgtcccggttatgggttggcggggggctgccatgcggcagggatacggcgctaacgatgcatctcaacaattgttgtgtaggtactccgccgccgagggacctgagcgagtccgcatcgaccggatcggaaaacctctcgagaaaggcgtctaaccagtcacagtcgcaaggtaggctgagcaccgtggcgggcggcagcgggcggcggtcggggttgtttctggcggaggtgctgctgatgatgtaattaaagtaggcggtcttgagacggcggatggtcgacagaagcaccatgtccttgggtccggcctgctgaatgcgcaggcggtcggccatgccccaggcttcgttttgacatcggcgcaggtctttgtagtagtcttgcatgagcctttctaccggcacttcttcttctccttcctcttgtcctgcatctcttgcatctatcgctgcggcggcggcggagtttggccgtaggtggcgccctcttcctcccatgcgtgtgaccccgaagcccctcatcggctgaagcagggctaggtcggcgacaacgcgctcggctaatatggcctgctgcacctgcgtgagggtagactggaagtcatccatgtccacaaagcggtggtatgcgcccgtgttgatggtgtaagtgcagttggccataacggaccagttaacggtctggtgacccggctgcgagagctcggtgtacctgagacgcgagtaagccctcgagtcaaatacgtagtcgttgcaagtccgcaccaggtactggtatcccaccaaaaagtgcggcggcggctggcggtagaggggccagcgtagggtggccggggctccgggggcgagatcttccaacataaggcgatgatatccgtagatgtacctggacatccaggtgatgccggcggcggtggtggaggcgcgcggaaagtcgcggacgcggttccagatgttgcgcagcggcaaaaagtgctccatggtcgggacgctctggccggtcaggcgcgcgcaatcgttgacgctctagcgtgcaaaaggagagcctgtaagcgggcactcttccgtggtctggtggataaattcgcaagggtatcatggcggacgaccggggttcgagccccgtatccggccgtccgccgtgatccatgcggttaccgcccgcgtgtcgaacccaggtgtgcgacgtcagacaacgggggagtgctccttttggcttccttccaggcgcggcggctgctgcgctagcttttttggccactggccgcgcgcagcgtaagcggttaggctggaaagcgaaagcattaagtggctcgctccctgtagccggagggttattttccaagggttgagtcgcgggacccccggttcgagtctcggaccggccggactgcggcgaacgggggtttgcctccccgtcatgcaagaccccgcttgcaaattcctccggaaacagggacgagccccttttttgcttttcccagatgcatccggtgctgcggcagatgcgcccccctcctcagcagcggcaagagcaagagcagcggcagacatgcagggcaccctcccctcctcctaccgcgtcaggaggggcgacatccgcggttgacgcggcagcagatggtgattacgaacccccgcggcgccgggcccggcactacctggacttggaggagggcgagggcctggcgcggctaggagcgccctctcctgagcggcacccaagggtgcagctgaagcgtgatacgcgtgaggcgtacgtgccgcggcagaacctgtttcgcgaccgcgagggagaggagcccgaggagatgcgggatcgaaagttccacgcagggcgcgagctgcggcatggcctgaatcgcgagcggttgctgcgcgaggaggactttgagcccgacgcgcgaaccgggattagtcccgcgcgcgcacacgtggcggccgccgacctggtaaccgcatacgagcagacggtgaaccaggagattaactttcaaaaaagctttaacaaccacgtgcgtacgcttgtggcgcgcgaggaggtggctataggactgatgcatctgtgggactttgtaagcgcgctggagcaaaacccaaatagcaagccgctcatggcgcagctgttccttatagtgcagcacagcagggacaacgaggcattcagggatgcgctgctaaacatagtagagcccgagggccgctggctgctcgatttgataaacatcctgcagagcatagtggtgcaggagcgcagcttgagcctggctgacaaggtggccgccatcaactattccatgcttagcctgggcaagttttacgcccgcaagatataccataccccttacgttcccatagacaaggaggtaaagatcgaggggttctacatgcgcatggcgctgaaggtgcttaccttgagcgacgacctgggcgtttatcgcaacgagcgcatccacaaggccgtgagcgtgagccggcggcgcgagctcagcgaccgcgagctgatgcacagcctgcaaagggccctggctggcacgggcagcggcgatagagaggccgagtcctactttgacgcgggcgctgacctgcgctgggccccaagccgacgcgccctggaggcagctggggccggacctgggctggcggtggcacccgcgcgcgctggcaacgtcggcggcgtggaggaatatgacgaggacgatgagtacgagccagaggacggcgagtactaagcggtgatgtttctgatcagatgatgcaagacgcaacggacccggcggtgcgggcggcgctgcagagccagccgtccggccttaactccacggacgactggcgccaggtcatggaccgcatcatgtcgctgactgcgcgcaatcctgacgcgttccggcagcagccgcaggccaaccggctctccgcaattctggaagcggtggtcccggcgcgcgcaaaccccacgcacgagaaggtgctggcgatcgtaaacgcgctggccgaaaacagggccatccggcccgacgaggccggcctggtctacgacgcgctgcttcagcgcgtggctcgttacaacagcggcaacgtgcagaccaacctggaccggctggtgggggatgtgcgcgaggccgtggcgcagcgtgagcgcgcgcagcagcagggcaacctgggctccatggttgcactaaacgccttcctgagtacacagcccgccaacgtgccgcggggacaggaggactacaccaactttgtgagcgcactgcggctaatggtgactgagacaccgcaaagtgaggtgtaccagtctgggccagactattttttccagaccagtagacaaggcctgcagaccgtaaacctgagccaggctttcaaaaacttgcaggggctgtggggggtgcgggctcccacaggcgaccgcgcgaccgtgtctagcttgctgacgcccaactcgcgcctgttgctgctgctaatagcgcccttcacggacagtggcagcgtgtcccgggacacatacctaggtcacttgctgacactgtaccgcgaggccataggtcaggcgcatgtggacgagcatactttccaggagattacaagtgtcagccgcgcgctggggcaggaggacacgggcagcctggaggcaaccctaaactacctgctgaccaaccggcggcagaagatcccctcgttgcacagtttaaacagcgaggaggagcgcattttgcgctacgtgcagcagagcgtgagccttaacctgatgcgcgacggggtaacgcccagcgtggcgctggacatgaccgcgcgcaacatggaaccgggcatgtatgcctcaaaccggccgtttatcaaccgcctaatggactacttgcatcgcgcggccgccgtgaaccccgagtatttcaccaatgccatcttgaacccgcactggctaccgccccctggtttctacaccgggggattcgaggtgcccgagggtaacgatggattcctctgggacgacatagacgacagcgtgttttccccgcaaccgcagaccctgctagagttgcaacagcgcgagcaggcagaggcggcgctgcgaaaggaaagcttccgcaggccaagcagcttgtccgatctaggcgctgcggccccgcggtcagatgctagtagcccatttccaagcttgatagggtctcttaccagcactcgcaccacccgcccgcgcctgctgggcgaggaggagtacctaaacaactcgctgctgcagccgcagcgcgaaaaaaacctgcctccggcatttcccaacaacgggatagagagcctagtggacaagatgagtagatggaagacgtacgcgcaggagcacagggacgtgccaggcccgcgcccgcccacccgtcgtcaaaggcacgaccgtcagcggggtctggtgtgggaggacgatgactcggcagacgacagcagcgtcctggatttgggagggagtggcaacccgtttgcgcaccttcgccccaggctggggagaatgttttaaaaaaaaaaaagcatgatgcaaaataaaaaactcaccaaggccatggcaccgagcgttggttttcttgtattccccttagtatgcggcgcgcggcgatgtatgaggaaggtcctcctccctcctacgagagtgtggtgagcgcggcgccagtggcggcggcgctgggttctcccttcgatgctcccctggacccgccgtttgtgcctccgcggtacctgcggcctaccggggggagaaacagcatccgttactctgagttggcacccctattcgacaccacccgtgtgtacctggtggacaacaagtcaacggatgtggcatccctgaactaccagaacgaccacagcaactttctgaccacggtcattcaaaacaatgactacagcccgggggaggcaagcacacagaccatcaatcttgacgaccggtcgcactggggcggcgacctgaaaaccatcctgcataccaacatgccaaatgtgaacgagttcatgtttaccaataagtttaaggcgcgggtgatggtgtcgcgcttgcctactaaggacaatcaggtggagctgaaatacgagtgggtggagttcacgctgcccgagggcaactactccgagaccatgaccatagaccttatgaacaacgcgatcgtggagcactacttgaaagtgggcagacagaacggggttctggaaagcgacatcggggtaaagtttgacacccgcaacttcagactggggtttgaccccgtcactggtcttgtcatgcctggggtatatacaaacgaagccttccatccagacatcattttgctgccaggatgcggggtggacttcacccacagccgcctgagcaacttgttgggcatccgcaagcggcaacccttccaggagggctttaggatcacctacgatgatctggagggtggtaacattcccgcactgttggatgtggacgcctaccaggcgagcttgaaagatgacaccgaacagggcgggggtggcgcaggcggcagcaacagcagtggcagcggcgcggaagagaactccaacgcggcagccgcggcaatgcagccggtggaggacatgaacgatcatgccattcgcggcgacacctttgccacacgggctgaggagaagcgcgctgaggccgaagcagcggccgaagctgccgcccccgctgcgcaacccgaggtcgagaagcctcagaagaaaccggtgatcaaacccctgacagaggacagcaagaaacgcagttacaacctaataagcaatgacagcaccttcacccagtaccgcagctggtaccttgcatacaactacggcgaccctcagaccggaatccgctcatggaccctgctttgcactcctgacgtaacctgcggctcggagcaggtctactggtcgttgccagacatgatgcaagaccccgtgaccttccgctccacgcgccagatcagcaactttccggtggtgggcgccgagctgttgcccgtgcactccaagagcttctacaacgaccaggccgtctactcccaactcatccgccagtttacctctctgacccacgtgttcaatcgctttcccgagaaccagattttggcgcgcccgccagcccccaccatcaccaccgtcagtgaaaacgttcctgctctcacagatcacgggacgctaccgctgcgcaacagcatcggaggagtccagcgagtgaccattactgacgccagacgccgcacctgcccctacgtttacaaggccctgggcatagtctcgccgcgcgtcctatcgagccgcactttttgagcaagcatgtccatccttatatcgcccagcaataacacaggctggggcctgcgcttcccaagcaagatgtttggcggggccaagaagcgctccgaccaacacccagtgcgcgtgcgcgggcactaccgcgcgccctggggcgcgcacaaacgcggccgcactgggcgcaccaccgtcgatgacgccatcgacgcggtggtggaggaggcgcgcaactacacgcccacgccgccaccagtgtccacagtggacgcggccattcagaccgtggtgcgcggagcccggcgctatgctaaaatgaagagacggcggaggcgcgtagcacgtcgccaccgccgccgacccggcactgccgcccaacgcgcggcggcggccctgcttaaccgcgcacgtcgcaccggccgacgggcggccatgcgggccgctcgaaggctggccgcgggtattgtcactgtgccccccaggtccaggcgacgagcggccgccgcagcagccgcggccattagtgctatgactcagggtcgcaggggcaacgtgtattgggtgcgcgactcggttagcggcctgcgcgtgcccgtgcgcacccgccccccgcgcaactagattgcaagaaaaaactacttagactcgtactgttgtatgtatccagcggcggcggcgcgcaacgaagctatgtccaagcgcaaaatcaaagaagagatgctccaggtcatcgcgccggagatctatggccccccgaagaaggaagagcaggattacaagccccgaaagctaaagcgggtcaaaaagaaaaagaaagatgatgatgatgaacttgacgacgaggtggaactgctgcacgctaccgcgcccaggcgacgggtacagtggaaaggtcgacgcgtaaaacgtgttttgcgacccggcaccaccgtagtctttacgcccggtgagcgctccacccgcacctacaagcgcgtgtatgatgaggtgtacggcgacgaggacctgcttgagcaggccaacgagcgcctcggggagtttgcctacggaaagcggcataaggacatgctggcgttgccgctggacgagggcaacccaacacctagcctaaagcccgtaacactgcagcaggtgctgcccgcgcttgcaccgtccgaagaaaagcgcggcctaaagcgcgagtctggtgacttggcacccaccgtgcagctgatggtacccaagcgccagcgactggaagatgtcttggaaaaaatgaccgtggaacctgggctggagcccgaggtccgcgtgcggccaatcaagcaggtggcgccgggactgggcgtgcagaccgtggacgttcagatacccactaccagtagcaccagtattgccaccgccacagagggcatggagacacaaacgtccccggttgcctcagcggtggcggatgccgcggtgcaggcggtcgctgcggccgcgtccaagacctctacggaggtgcaaacggacccgtggatgtttcgcgtttcagccccccggcgcccgcgccgttcgaggaagtacggcgccgccagcgcgctactgcccgaatatgccctacatccttccattgcgcctacccccggctatcgtggctacacctaccgccccagaagacgagcaactacccgacgccgaaccaccactggaacccgccgccgccgtcgccgtcgccagcccgtgctggccccgatttccgtgcgcagggtggctcgcgaaggaggcaggaccctggtgctgccaacagcgcgctaccaccccagcatcgtttaaaagccggtctttgtggttcttgcagatatggccctcacctgccgcctccgtttcccggtgccgggattccgaggaagaatgcaccgtaggaggggcatggccggccacggcctgacgggcggcatgcgtcgtgcgcaccaccggcggcggcgcgcgtcgcaccgtcgcatgcgcggcggtatcctgcccctccttattccactgatcgccgcggcgattggcgccgtgcccggaattgcatccgtggccttgcaggcgcagagacactgattaaaaacaagttgcatgtggaaaaatcaaaataaaaagtctggactctcacgctcgcttggtcctgtaactattttgtagaatggaagacatcaactttgcgtctctggccccgcgacacggctcgcgcccgttcatgggaaactggcaagatatcggcaccagcaatatgagcggtggcgccttcagctggggctcgctgtggagcggcattaaaaatttcggttccaccgttaagaactatggcagcaaggcctggaacagcagcacaggccagatgctgagggataagttgaaagagcaaaatttccaacaaaaggtggtagatggcctggcctctggcattagcggggtggtggacctggccaaccaggcagtgcaaaataagattaacagtaagcttgatccccgccctcccgtagaggagcctccaccggccgtggagacagtgtctccagaggggcgtggcgaaaagcgtccgcgccccgacagggaagaaactctggtgacgcaaatagacgagcctccctcgtacgaggaggcactaaagcaaggcctgcccaccacccgtcccatcgcgcccatggctaccggagtgctgggccagcacacacccgtaacgctggacctgcctccccccgccgacacccagcagaaacctgtgctgccaggcccgaccgccgttgttgtaacccgtcctagccgcgcgtccctgcgccgcgccgccagcggtccgcgatcgttgcggcccgtagccagtggcaactggcaaagcacactgaacagcatcgtgggtctgggggtgcaatccctgaagcgccgacgatgcttctgatagctaacgtgtcgtatgtgtgtcatgtatgcgtccatgtcgccgccagaggagctgctgagccgccgcgcgcccgctttccaagatggctaccccttcgatgatgccgcagtggtcttacatgcacatctcgggccaggacgcctcggagtacctgagccccgggctggtgcagtttgcccgcgccaccgagacgtacttcagcctgaataacaagtttagaaaccccacggtggcgcctacgcacgacgtgaccacagaccggtcccagcgtttgacgctgcggttcatccctgtggaccgtgaggatactgcgtactcgtacaaggcgcggttcaccctagctgtgggtgataaccgtgtgctggacatggcttccacgtactttgacatccgcggcgtgctggacaggggccctacttttaagccctactctggcactgcctacaacgccctggctcccaagggtgccccaaatccttgcgaatgggatgaagctgctactgctcttgaaataaacctagaagaagaggacgatgacaacgaagacgaagtagacgagcaagctgagcagcaaaaaactcacgtatttgggcaggcgccttattctggtataaatattacaaaggagggtattcaaataggtgtcgaaggtcaaacacctaaatatgccgataaaacatttcaacctgaacctcaaataggagaatctcagtggtacgaaacagaaattaatcatgcagctgggagagtcctaaaaaagactaccccaatgaaaccatgttacggttcatatgcaaaacccacaaatgaaaatggagggcaaggcattcttgtaaagcaacaaaatggaaagctagaaagtcaagtggaaatgcaatttttctcaactactgaggcagccgcaggcaatggtgataacttgactcctaaagtggtattgtacagtgaagatgtagatatagaaaccccagacactcatatttcttacatgcccactattaaggaaggtaactcacgagaactaatgggccaacaatctatgcccaacaggcctaattacattgcttttagggacaattttattggtctaatgtattacaacagcacgggtaatatgggtgttctggcgggccaagcatcgcagttgaatgctgttgtagatttgcaagacagaaacacagagctttcataccagcttttgcttgattccattggtgatagaaccaggtacttttctatgtggaatcaggctgttgacagctatgatccagatgttagaattattgaaaatcatggaactgaagatgaacttccaaattactgctttccactgggaggtgtgattaatacagagactcttaccaaggtaaaacctaaaacaggtcaggaaaatggatgggaaaaagatgctacagaattttcagataaaaatgaaataagagttggaaataattttgccatggaaatcaatctaaatgccaacctgtggagaaatttcctgtactccaacatagcgctgtatttgcccgacaagctaaagtacagtccttccaacgtaaaaatttctgataacccaaacacctacgactacatgaacaagcgagtggtggctcccgggctagtggactgctacattaaccttggagcacgctggtcccttgactatatggacaacgtcaacccatttaaccaccaccgcaatgctggcctgcgctaccgctcaatgttgctgggcaatggtcgctatgtgcccttccacatccaggtgcctcagaagttctttgccattaaaaacctccttctcctgccgggctcatacacctacgagtggaacttcaggaaggatgttaacatggttctgcagagctccctaggaaatgacctaagggttgacggagccagcattaagtttgatagcatttgcctttacgccaccttcttccccatggcccacaacaccgcctccacgcttgaggccatgcttagaaacgacaccaacgaccagtcctttaacgactatctctccgccgccaacatgctctaccctatacccgccaacgctaccaacgtgcccatatccatcccctcccgcaactgggcggctttccgcggctgggccttcacgcgccttaagactaaggaaaccccatcactgggctcgggctacgacccttattacacctactctggctctataccctacctagatggaaccttttacctcaaccacacctttaagaaggtggccattacctttgactcttctgtcagctggcctggcaatgaccgcctgcttacccccaacgagtttgaaattaagcgctcagttgacggggagggttacaacgttgcccagtgtaacatgaccaaagactggttcctggtacaaatgctagctaactataacattggctaccagggcttctatatcccagagagctacaaggaccgcatgtactccttctttagaaacttccagcccatgagccgtcaggtggtggatgatactaaatacaaggactaccaacaggtgggcatcctacaccaacacaacaactctggatttgttggctaccttgcccccaccatgcgcgaaggacaggcctaccctgctaacttcccctatccgcttataggcaagaccgcagttgacagcattacccagaaaaagtttctttgcgatcgcaccctttggcgcatcccattctccagtaactttatgtccatgggcgcactcacagacctgggccaaaaccttctctacgccaactccgcccacgcgctagacatgacttttgaggtggatcccatggacgagcccacccttctttatgttttgtttgaagtctttgacgtggtccgtgtgcaccagccgcaccgcggcgtcatcgaaaccgtgtacctgcgcacgcccttctcggccggcaacgccacaacataaagaagcaagcaacatcaacaacagctgccgccatgggctccagtgagcaggaactgaaagccattgtcaaagatcttggttgtgggccatattttttgggcacctatgacaagcgctttccaggctttgtttctccacacaagctcgcctgcgccatagtcaatacggccggtcgcgagactgggggcgtacactggatggcctttgcctggaacccgcactcaaaaacatgctacctctttgagccctttggcttttctgaccagcgactcaagcaggtttaccagtttgagtacgagtcactcctgcgccgtagcgccattgcttcttcccccgaccgctgtataacgctggaaaagtccacccaaagcgtacaggggcccaactcggccgcctgtggactattctgctgcatgtttctccacgcctttgccaactggccccaaactcccatggatcacaaccccaccatgaaccttattaccggggtacccaactccatgctcaacagtccccaggtacagcccaccctgcgtcgcaaccaggaacagctctacagcttcctggagcgccactcgccctacttccgcagccacagtgcgcagattaggagcgccacttctttttgtcacttgaaaaacatgtaaaaataatgtactagagacactttcaataaaggcaaatgcttttatttgtacactctcgggtgattatttacccccacccttgccgtctgcgccgtttaaaaatcaaaggggttctgccgcgcatcgctatgcgccactggcagggacacgttgcgatactggtgtttagtgctccacttaaactcaggcacaaccatccgcggcagctcggtgaagttttcactccacaggctgcgcaccatcaccaacgcgtttagcaggtcgggcgccgatatcttgaagtcgcagttggggcctccgccctgcgcgcgcgagttgcgatacacagggttgcagcactggaacactatcagcgccgggtggtgcacgctggccagcacgctcttgtcggagatcagatccgcgtccaggtcctccgcgttgctcagggcgaacggagtcaactttggtagctgccttcccaaaaagggcgcgtgcccaggctttgagttgcactcgcaccgtagtggcatcaaaaggtgaccgtgcccggtctgggcgttaggatacagcgcctgcataaaagccttgatctgcttaaaagccacctgagcctttgcgccttcagagaagaacatgccgcaagacttgccggaaaactgattggccggacaggccgcgtcgtgcacgcagcaccttgcgtcggtgttggagatctgcaccacatttcggccccaccggttcttcacgatcttggccttgctagactgctccttcagcgcgcgctgcccgttttcgctcgtcacatccatttcaatcacgtgctccttatttatcataatgcttccgtgtagacacttaagctcgccttcgatctcagcgcagcggtgcagccacaacgcgcagcccgtgggctcgtgatgcttgtaggtcacctctgcaaacgactgcaggtacgcctgcaggaatcgccccatcatcgtcacaaaggtcttgttgctggtgaaggtcagctgcaacccgcggtgctcctcgttcagccaggtcttgcatacggccgccagagcttccacttggtcaggcagtagtttgaagttcgcctttagatcgttatccacgtggtacttgtccatcagcgcgcgcgcagcctccatgcccttctcccacgcagacacgatcggcacactcagcgggttcatcaccgtaatttcactttccgcttcgctgggctcttcctcttcctcttgcgtccgcataccacgcgccactgggtcgtcttcattcagccgccgcactgtgcgcttacctcctttgccatgcttgattagcaccggtgggttgctgaaacccaccatttgtagcgccacatcttctctttcttcctcgctgtccacgattacctctggtgatggcgggcgctcgggcttgggagaagggcgcttctttttcttcttgggcgcaatggccaaatccgccgccgaggtcgatggccgcgggctgggtgtgcgcggcaccagcgcgtcttgtgatgagtcttcctcgtcctcggactcgatacgccgcctcatccgcttttttgggggcgcccggggaggcggcggcgacggggacggggacgacacgtcctccatggttgggggacgtcgcgccgcaccgcgtccgcgctcgggggtggtttcgcgctgctcctcttcccgactggccatttccttctcctataggcagaaaaagatcatggagtcagtcgagaagaaggacagcctaaccgccccctctgagttcgccaccaccgcctccaccgatgccgccaacgcgcctaccaccttccccgtcgaggcacccccgcttgaggaggaggaagtgattatcgagcaggacccaggttttgtaagcgaagacgacgaggaccgctcagtaccaacagaggataaaaagcaagaccaggacaacgcagaggcaaacgaggaacaagtcgggcggggggacgaaaggcatggcgactacctagatgtgggagacgacgtgctgttgaagcatctgcagcgccagtgcgccattatctgcgacgcgttgcaagagcgcagcgatgtgcccctcgccatagcggatgtcagccttgcctacgaacgccacctattctcaccgcgcgtaccccccaaacgccaagaaaacggcacatgcgagcccaacccgcgcctcaacttctaccccgtatttgccgtgccagaggtgcttgccacctatcacatctttttccaaaactgcaagatacccctatcctgccgtgccaaccgcagccgagcggacaagcagctggccttgcggcagggcgctgtcatacctgatatcgcctcgctcaacgaagtgccaaaaatctttgagggtcttggacgcgacgagaagcgcgcggcaaacgctctgcaacaggaaaacagcgaaaatgaaagtcactctggagtgttggtggaactcgagggtgacaacgcgcgcctagccgtactaaaacgcagcatcgaggtcacccactttgcctacccggcacttaacctaccccccaaggtcatgagcacagtcatgagtgagctgatcgtgcgccgtgcgcagcccctggagagggatgcaaatttgcaagaacaaacagaggagggcctacccgcagttggcgacgagcagctagcgcgctggcttcaaacgcgcgagcctgccgacttggaggagcgacgcaaactaatgatggccgcagtgctcgttaccgtggagcttgagtgcatgcagcggttctttgctgacccggagatgcagcgcaagctagaggaaacattgcactacacctttcgacagggctacgtacgccaggcctgcaagatctccaacgtggagctctgcaacctggtctcctaccttggaattttgcacgaaaaccgccttgggcaaaacgtgcttcattccacgctcaagggcgaggcgcgccgcgactacgtccgcgactgcgtttacttatttctatgctacacctggcagacggccatgggcgtttggcagcagtgcttggaggagtgcaacctcaaggagctgcagaaactgctaaagcaaaacttgaaggacctatggacggccttcaacgagcgctccgtggccgcgcacctggcggacatcattttccccgaacgcctgcttaaaaccctgcaacagggtctgccagacttcaccagtcaaagcatgttgcagaactttaggaactttatcctagagcgctcaggaatcttgcccgccacctgctgtgcacttcctagcgactttgtgcccattaagtaccgcgaatgccctccgccgctttggggccactgctaccttctgcagctagccaactaccttgcctaccactctgacataatggaagacgtgagcggtgacggtctactggagtgtcactgtcgctgcaacctatgcaccccgcaccgctccctggtttgcaattcgcagctgcttaacgaaagtcaaattatcggtacctttgagctgcagggtccctcgcctgacgaaaagtccgcggctccggggttgaaactcactccggggctgtggacgtcggcttaccttcgcaaatttgtacctgaggactaccacgcccacgagattaggttctacgaagaccaatcccgcccgcctaatgcggagcttaccgcctgcgtcattacccagggccacattcttggccaattgcaagccatcaacaaagcccgccaagagtttctgctacgaaagggacggggggtttacttggacccccagtccggcgaggagctcaacccaatccccccgccgccgcagccctatcagcagcagccgcgggcccttgcttcccaggatggcacccaaaaagaagctgcagctgccgccgccacccacggacgaggaggaatactgggacagtcaggcagaggaggttttggacgaggaggaggaggacatgatggaagactgggagagcctagacgaggaagcttccgaggtcgaagaggtgtcagacgaaacaccgtcaccctcggtcgcattcccctcgccggcgccccagaaatcggcaaccggttccagcatggctacaacctccgctcctcaggcgccgccggcactgcccgttcgccgacccaaccgtagatgggacaccactggaaccagggccggtaagtccaagcagccgccgccgttagcccaagagcaacaacagcgccaaggctaccgctcatggcgcgggcacaagaacgccatagttgcttgcttgcaagactgtgggggcaacatctccttcgcccgccgctttcttctctaccatcacggcgtggccttcccccgtaacatcctgcattactaccgtcatctctacagcccatactgcaccggcggcagcggcagcaacagcagcggccacacagaagcaaaggcgaccggatagcaagactctgacaaagcccaagaaatccacagcggcggcagcagcaggaggaggagcgctgcgtctggcgcccaacgaacccgtatcgacccgcgagcttagaaacaggatttttcccactctgtatgctatatttcaacagagcaggggccaagaacaagagctgaaaataaaaaacaggtctctgcgatccctcacccgcagctgcctgtatcacaaaagcgaagatcagcttcggcgcacgctggaagacgcggaggctctcttcagtaaatactgcgcgctgactcttaaggactagtttcgcgccctttctcaaatttaagcgcgaaaactacgtcatctccagcggccacacccggcgccagcacctgttgtcagcgccattatgagcaaggaaattcccacgccctacatgtggagttaccagccacaaatgggacttgcggctggagctgcccaagactactcaacccgaataaactacatgagcgcgggaccccacatgatatcccgggtcaacggaatacgcgcccaccgaaaccgaattctcctggaacaggcggctattaccaccacacctcgtaataaccttaatccccgtagttggcccgctgccctggtgtaccaggaaagtcccgctcccaccactgtggtacttcccagagacgcccaggccgaagttcagatgactaactcaggggcgcagcttgcgggcggctttcgtcacagggtgcggtcgcccgggcagggtataactcacctgacaatcagagggcgaggtattcagctcaacgacgagtcggtgagctcctcgcttggtctccgtccggacgggacatttcagatcggcggcgccggccgctcttcattcacgcctcgtcaggcaatcctaactctgcagacctcgtcctctgagccgcgctctggaggcattggaactctgcaatttattgaggagtttgtgccatcggtctactttaaccccttctcgggacctcccggccactatccggatcaatttattcctaactttgacgcggtaaaggactcggcggacggctacgactgaatgttaagtggagaggcagagcaactgcgcctgaaacacctggtccactgtcgccgccacaagtgctttgcccgcgactccggtgagttttgctactttgaattgcccgaggatcatatcgagggcccggcgcacggcgtccggcttaccgcccagggagagcttgcccgtagcctgattcgggagtttacccagcgccccctgctagttgagcgggacaggggaccctgtgttctcactgtgatttgcaactgtcctaaccctggattacatcaagatcctctagttaatgtcaggtcgcctaagtcgattaactagagtacccggggatcttattccctttaactaataaaaaaaaataataaagcatcacttacttaaaatcagttagcaaatttctgtccagtttattcagcagcacctccttgccctcctcccagctctggtattgcagcttcctcctggctgcaaactttctccacaatctaaatggaatgtcagtttcctcctgttcctgtccatccgcacccactatcttcatgttgttgcagatgaagcgcgcaagaccgtctgaagataccttcaaccccgtgtatccatatgacacggaaaccggtcctccaactgtgccttttcttactcctccctttgtatcccccaatgggtttcaagagagtccccctggggtactctctttgcgcctatccgaacctctagttacctccaatggcatgcttgcgctcaaaatgggcaacggcctctctctggacgaggccggcaaccttacctcccaaaatgtaaccactgtgagcccacctctcaaaaaaaccaagtcaaacataaacctggaaatatctgcacccctcacagttacctcagaagccctaactgtggctgccgccgcacctctaatggtcgcgggcaacacactcaccatgcaatcacaggccccgctaaccgtgcacgactccaaacttagcattgccacccaaggacccctcacagtgtcagaaggaaagctagccctgcaaacatcaggccccctcaccaccaccgatagcagtacccttactatcactgcctcaccccctctaactactgccactggtagcttgggcattgacttgaaagagcccatttatacacaaaatggaaaactaggactaaagtacggggctcctttgcatgtaacagacgacctaaacactttgaccgtagcaactggtccaggtgtgactattaataatacttccttgcaaactaaagttactggagccttgggttttgattcacaaggcaatatgcaacttaatgtagcaggaggactaaggattgattctcaaaacagacgccttatacttgatgttagttatccgtttgatgctcaaaaccaactaaatctaagactaggacagggccctctttttataaactcagcccacaacttggatattaactacaacaaaggcctttacttgtttacagcttcaaacaattccaaaaagcttgaggttaacctaagcactgccaaggggttgatgtttgacgctacagccatagccattaatgcaggagatgggcttgaatttggttcacctaatgcaccaaacacaaatcccctcaaaacaaaaattggccatggcctagaatttgattcaaacaaggctatggttcctaaactaggaactggccttagttttgacagcacaggtgccattacagtaggaaacaaaaataatgataagctaactttgtggaccggaataaaccctccacctaactgtcaaattgtggaaaacactaatacaaatgatggcaaacttactttagtattagtaaaaaatggagggcttgttaatggctacgtgtctctagttggtgtatcagacactgtgaaccaaatgttcacacaaaagacagcaaacatccaattaagattatattttgactcttctggaaatctattaactgaggaatcagacttaaaaattccacttaaaaataaatcttctacagcgaccagtgaaactgtagccagcagcaaagcctttatgccaagtactacagcttatcccttcaacaccactactagggatagtgaaaactacattcatggaatatgttactacatgactagttatgatagaagtctatttcccttgaacatttctataatgctaaacagccgtatgatttcttccaatgttgcctatgccatacaatttgaatggaatctaaatgcaagtgaatctccagaaagcaacatagctacgctgaccacatccccctttttcttttcttacattacagaagacgacaactaaagaatcgtttgtgttatgtttcaacgtgtttatttttcaattgcagaaaatttcaagtcatttttcattcagtagtatagccccaccaccacatagcttatacagatcaccgtaccttaatcaaactcacagaaccctagtattcaacctgccacctccctcccaacacacagagtacacagtcctttctccccggctggccttaaaaagcatcatatcatgggtaacagacatattcttaggtgttatattccacacggtttcctgtcgagccaaacgctcatcagtgatattaataaactccccgggcagctcacttaagttcatgtcgctgtccagctgctgagccacaggctgctgtccaacttgcggttgcttaacgggcggcgaaggagaagtccacgcctacatgggggtagagtcataatcgtgcatcaggatagggcggtggtgctgcagcagcgcgcgaataaactgctgccgccgccgctccgtcctgcaggaatacaacatggcagtggtctcctcagcgatgattcgcaccgcccgcagcataaggcgccttgtcctccgggcacagcagcgcaccctgatctcacttaaatcagcacagtaactgcagcacagcaccacaatattgttcaaaatcccacagtgcaaggcgctgtatccaaagctcatggcggggaccacagaacccacgtggccatcataccacaagcgcaggtagattaagtggcgacccctcataaacacgctggacataaacattacctcttttggcatgttgtaattcaccacctcccctctgattaaacatggcgccatccaccaccatcctaaaccagctggccaaaacctgcccgccggctatacactgcagggaaccgggactggaacaatgacagtggagagcccaggactcgtaaccatggatcatcatgctcgtcatgatatcaatgttggcacaacacaggcacacgtgcatacacttcctcaggattacaagctcctcccgcgttagaaccatatcccagggaacaacccattcctgaatcagcgtaaatcccacactgcagggaagacctcgcacgtaactcacgttgtgcattgtcaaagtgttacattcgggcagcagcggatgatcctccagtatggtagcgcgggtttctgtctcaaaaggaggtagacgatccctactgtacggagtgcgccgagacaaccgagatcgtgttggtcgtagtgtcatgccaaatggaacgccggacgtagtcatatttcctgaagcaaaaccaggtgcgggcgtgacaaacagatctgcgtctccggtctcgccgcttagatcgctctgtgtagtagttgtagtatatccactctctcaaagcatccaggcgccccctggcttcgggttctatgtaaactccttcatgcgccgctgccctgataacatccaccaccgcagaataagccacacccagccaacctacacattcgttctgcgagtcacacacgggaggagcgggaagagctggaagaaccatgtttttttttttattccaaaagattatccaaaacctcaaaatgaagatctattaagtgaacgcgctcccctccggtggcgtggtcaaactctacagccaaagaacagataatggcatttgtaagatgttgcacaatggcttccaaaaggcaaacggccctcacgtccaagtggacgtaaaggctaaacccttcagggtgaatctcctctataaacattccagcaccttcaaccatgcccaaataattctcatctcgccaccttctcaatatatctctaagcaaatcccgaatattaagtccggccattgtaaaaatctgctccagagcgccctccaccttcagcctcaagcagcgaatcatgattgcaaaaattcaggttcctcacagacctgtataagattcaaaagcggaacattaacaaaaataccgcgatcccgtaggtcccttcgcagggccagctgaacataatcgtgcaggtctgcacggaccagcgcggccacttccccgccaggaaccatgacaaaagaacccacactgattatgacacgcatactcggagctatgctaaccagcgtagccccgatgtaagcttgttgcatgggcggcgatataaaatgcaaggtgctgctcaaaaaatcaggcaaagcctcgcgcaaaaaagaaagcacatcgtagtcatgctcatgcagataaaggcaggtaagctccggaaccaccacagaaaaagacaccatttttctctcaaacatgtctgcgggtttctgcataaacacaaaataaaataacaaaaaaacatttaaacattagaagcctgtcttacaacaggaaaaacaacccttataagcataagacggactacggccatgccggcgtgaccgtaaaaaaactggtcaccgtgattaaaaagcaccaccgacagctcctcggtcatgtccggagtcataatgtaagactcggtaaacacatcaggttgattcacatcggtcagtgctaaaaagcgaccgaaatagcccgggggaatacatacccgcaggcgtagagacaacattacagcccccataggaggtataacaaaattaataggagagaaaaacacataaacacctgaaaaaccctcctgcctaggcaaaatagcaccctcccgctccagaacaacatacagcgcttccacagcggcagccataacagtcagccttaccagtaaaaaagaaaacctattaaaaaaacaccactcgacacggcaccagctcaatcagtcacagtgtaaaaaagggccaagtgcagagcgagtatatataggactaaaaaatgacgtaacggttaaagtccacaaaaaacacccagaaaaccgcacgcgaacctacgcccagaaacgaaagccaaaaaacccacaacttcctcaaatcgtcacttccgttttcccacgttacgtcacttcccattttaagaaaactacaattcccaacacatacaagttactccgccctaaaacctacgtcacccgccccgttcccacgccccgcgccacgtcacaaactccaccccctcattatcatattggcttcaatccaaaataaggtatattattgatgatg

SEQ ID NO: 5 - DNA, 31660 bp, Artificial Sequence
  pAdk35-E4dlO4-7
ttaattaagaattaattcgatcctgaatggcgaatggacgcgccctgtagcggcgcattaagcgcggcgggtgtggtggttacgcgcagcgtgaccgctacacttgccagcgccctagcgcccgctcctttcgctttcttcccttcctttctcgccacgttcgccggctttccccgtcaagctctaaatcgggggctccctttagggttccgatttagtgctttacggcacctcgaccccaaaaaacttgattagggtgatggttcacgtagtgggccatcgccctgatagacggtttttcgccctttgacgttggagtccacgttctttaatagtggactcttgttccaaactggaacaacactcaaccctatctcggtctattcttttgatttataagggattttgccgatttcggcctattggttaaaaaatgagctgatttaacaaaaattttaacaaaattcagaagaactcgtcaagaaggcgatagaaggcgatgcgctgcgaatcgggagcggcgataccgtaaagcacgaggaagcggtcagcccattcgccgccaagctcttcagcaatatcacgggtagccaacgctatgtcctgatagcggtccgccacacccagccggccacagtcgatgaatccagaaaagcggccattttccaccatgatattcggcaagcaggcatcgccatgggtcacgacgagatcctcgccgtcgggcatgctcgccttgagcctggcgaacagttcggctggcgcgagcccctgatgctcttcgtccagatcatcctgatcgacaagaccggcttccatccgagtacgtgctcgctcgatgcgatgtttcgcttggtggtcgaatgggcaggtagccggatcaagcgtatgcagccgccgcattgcatcagccatgatggatactttctcggcaggagcaaggtgagatgacaggagatcctgccccggcacttcgcccaatagcagccagtcccttcccgcttcagtgacaacgtcgagcacagctgcgcaaggaacgcccgtcgtggccagccacgatagccgcgctgcctcgtcttgcagttcattcagggcaccggacaggtcggtcttgacaaaaagaaccgggcgcccctgcgctgacagccggaacacggcggcatcagagcagccgattgtctgttgtgcccagtcatagccgaatagcctctccacccaagcggccggagaacctgcgtgcaatccatcttgttcaatcatgcgaaacgatcctcatcctgtctcttgatcagagcttgatcccctgcgccatcagatccttggcggcaagaaagccatccagtttactttgcagggcttcccaaccttaccagagggcgccccagctggcaattccggttcgcttgctgtccataaaaccgcccagtctagctatcgccatgtaagcccactgcaagctacctgctttctctttgcgcttgcgttttcccttgtccagatagcccagtagctgacattcatccggggtcagcaccgtttctgcggactggctttctacgtgaaaaggatctaggtgaagatcctttttgataatctcatggctgcagcaatggcaacaacgttgcgcaaactattaactggcgaactacttactctagcttcccggcaacaattaatagactggatggaggcggataaagttgcaggaccacttctgcgctcggcccttccggctggctggtttattgctgataaatctggagccggtgagcgtgggtctcgcggtatcattgcagcactggggccagatggtaagccctcccgtatcgtagttatctacacgacggggagtcaggcaactatggatgaacgaaatagacagatcgctgagataggtgcctcactgattaagcattggtaactgtcagaccaagtttactcatatatactttagattgatttaaaacttcatttttaatttaaaaggatctaggtgaagatcctttttgataatctcatgaccaaaatcccttaacgtgagttttcgttccactgagcgtcagaccccgtagaaaagatcaaaggatcttcttgagatcctttttttctgcgcgtaatctgctgcttgcaaacaaaaaaaccaccgctaccagcggtggtttgtttgccggatcaagagctaccaactctttttccgaaggtaactggcttcagcagagcgcagataccaaatactgtccttctagtgtagccgtagttaggccaccacttcaagaactctgtagcaccgcctacatacctcgctctgctaatcctgttaccagtggctgctgccagtggcgataagtcgtgtcttaccgggttggactcaagacgatagttaccggataaggcgcagcggtcgggctgaacggggggttcgtgcacacagcccagcttggagcgaacgacctacaccgaactgagatacctacagcgtgagctatgagaaagcgccacgcttcccgaagggagaaaggcggacaggtatccggtaagcggcagggtcggaacaggagagcgcacgagggagcttccagggggaaacgcctggtatctttatagtcctgtcgggtttcgccacctctgacttgagcgtcgatttttgtgatgctcgtcaggggggcggagcctatggaaaaacgccagcaacgcggcctttttacggttcctggccttttgctggccttttgctcacatgttctttcctgcgttatcccctgattctgtggataaccgtattaccgcctttgagtgagctgataccgctcgccgcagccgaacgaccgagcgcagcgagtcagtgagcgaggaagcggaagagcgcctgatgcggtattttctccttacgcatctgtgcggtatttcacaccgcatatggatccatgcatgttaattaacatcatcaataatataccttattttggattgaagccaatatgataatgagggggtggagtttgtgacgtggcgcggggcgtgggaacggggcgggtgacgtagtagtgtggcggaagtgtgatgttgcaagtgtggcggaacacatgtaagcgacggatgtggcaaaagtgacgtttttggtgtgcgccggtgtacacaggaagtgacaattttcgcgcggttttaggcggatgttgtagtaaatttgggcgtaaccgagtaagatttggccattttcgcgggaaaactgaataagaggaagtgaaatctgaataattttgtgttactcatagcgcgtaataatttaaattgggcgtggcttaagggtgggaaagaatatataaggtgggggtcttatgtagttttgtatctgttttgcagcagccgccgccgccatgagcaccaactcgtttgatggaagcattgtgagctcatatttgacaacgcgcatgcccccatgggccggggtgcgtcagaatgtgatgggctccagcattgatggtcgccccgtcctgcccgcaaactctactaccttgacctacgagaccgtgtctggaacgccgttggagactgcagcctccgccgccgcttcagccgctgcagccaccgcccgcgggattgtgactgactttgctttcctgagcccgcttgcaagcagtgcagcttcccgttcatccgcccgcgatgacaagttgacggctcttttggcacaattggattctttgacccgggaacttaatgtcgtttctcagcagctgttggatctgcgccagcaggtttctgccctgaaggcttcctcccctcccaatgcggtttaaaacataaataaaaaaccagactctgtttggatttggatcaagcaagtgtcttgctgtctttatttaggggttttgcgcgcgcggtaggcccgggaccagcggtctcggtcgttgagggtcctgtgtattttttccaggacgtggtaaaggtgactctggatgttcagatacatgggcataagcccgtctctggggtggaggtagcaccactgcagagcttcatgctgcggggtggtgttgtagatgatccagtcgtagcaggagcgctgggcgtggtgcctaaaaatgtctttcagtagcaagctgattgccaggggcaggcccttggtgtaagtgtttacaaagcggttaagctgggatgggtgcatacgtggggatatgagatgcatcttggactgtatttttaggttggctatgttcccagccatatccctccggggattcatgttgtgcagaaccaccagcacagtgtatccggtgcacttgggaaatttgtcatgtagcttagaaggaaatgcgtggaagaacttggagacgcccttgtgacctccaagattttccatgcattcgtccataatgatggcaatgggcccacgggcggcggcctgggcgaagatatttctgggatcactaacgtcatagttgtgttccaggatgagatcgtcataggccatttttacaaagcgcgggcggagggtgccagactgcggtataatggttccatccggcccaggggcgtagttaccctcacagatttgcatttcccacgctttgagttcagatggggggatcatgtctacctgcggggcgatgaagaaaacggtttccggggtaggggagatcagctgggaagaaagcaggttcctgagcagctgcgacttaccgcagccggtgggcccgtaaatcacacctattaccgggtgcaactggtagttaagagagctgcagctgccgtcatccctgagcaggggggccacttcgttaagcatgtccctgactcgcatgttttccctgaccaaatccgccagaaggcgctcgccgcccagcgatagcagttcttgcaaggaagcaaagtttttcaacggtttgagaccgtccgccgtaggcatgcttttgagcgtttgaccaagcagttccaggcggtcccacagctcggtcacctgctctacggcatctcgatccagcatatctcctcgtttcgcgggttggggcggctttcgctgtacggcagtagtcggtgctcgtccagacgggccagggtcatgtctttccacgggcgcagggtcctcgtcagcgtagtctgggtcacggtgaaggggtgcgctccgggctgcgcgctggccagggtgcgcttgaggctggtcctgctggtgctgaagcgctgccggtcttcgccctgcgcgtcggccaggtagcatttgaccatggtgtcatagtccagcccctccgcggcgtggcccttggcgcgcagcttgcccttggaggaggcgccgcacgaggggcagtgcagacttttgagggcgtagagcttgggcgcgagaaataccgattccggggagtaggcatccgcgccgcaggccccgcagacggtctcgcattccacgagccaggtgagctctggccgttcggggtcaaaaaccaggtttcccccatgctttttgatgcgtttcttacctctggtttccatgagccggtgtccacgctcggtgacgaaaaggctgtccgtgtccccgtatacagacttgagaggcctgtcctcgagcggtgttccgcggtcctcctcgtatagaaactcggaccactctgagacaaaggctcgcgtccaggccagcacgaaggaggctaagtgggaggggtagcggtcgttgtccactagggggtccactcgctccagggtgtgaagacacatgtcgccctcttcggcatcaaggaaggtgattggtttgtaggtgtaggccacgtgaccgggtgttcctgaaggggggctataaaagggggtgggggcgcgttcgtcctcactctcttccgcatcgctgtctgcgagggccagctgttggggtgagtactccctctgaaaagcgggcatgacttctgcgctaagattgtcagtttccaaaaacgaggaggatttgatattcacctggcccgcggtgatgcctttgagggtggccgcatccatctggtcagaaaagacaatctttttgttgtcaagcttggtggcaaacgacccgtagagggcgttggacagcaacttggcgatggagcgcagggtttggtttttgtcgcgatcggcgcgctccttggccgcgatgtttagctgcacgtattcgcgcgcaacgcaccgccattcgggaaagacggtggtgcgctcgtcgggcaccaggtgcacgcgccaaccgcggttgtgcagggtgacaaggtcaacgctggtggctacctctccgcgtaggcgctcgttggtccagcagaggcggccgcccttgcgcgagcagaatggcggtagggggtctagctgcgtctcgtccggggggtctgcgtccacggtaaagaccccgggcagcaggcgcgcgtcgaagtagtctatcttgcatccttgcaagtctagcgcctgctgccatgcgcgggcggcaagcgcgcgctcgtatgggttgagtgggggaccccatggcatggggtgggtgagcgcggaggcgtacatgccgcaaatgtcgtaaacgtagaggggctctctgagtattccaagatatgtagggtagcatcttccaccgcggatgctggcgcgcacgtaatcgtatagttcgtgcgagggagcgaggaggtcgggaccgaggttgctacgggcgggctgctctgctcggaagactatctgcctgaagatggcatgtgagttggatgatatggttggacgctggaagacgttgaagctggcgtctgtgagacctaccgcgtcacgcacgaaggaggcgtaggagtcgcgcagcttgttgaccagctcggcggtgacctgcacgtctagggcgcagtagtccagggtttccttgatgatgtcatacttatcctgtcccttttttttccacagctcgcggttgaggacaaactcttcgcggtctttccagtactcttggatcggaaacccgtcggcctccgaacggtaagagcctagcatgtagaactggttgacggcctggtaggcgcagcatcccttttctacgggtagcgcgtatgcctgcgcggccttccggagcgaggtgtgggtgagcgcaaaggtgtccctgaccatgactttgaggtactggtatttgaagtcagtgtcgtcgcatccgccctgctcccagagcaaaaagtccgtgcgctttttggaacgcggatttggcagggcgaaggtgacatcgttgaagagtatctttcccgcgcgaggcataaagttgcgtgtgatgcggaagggtcccggcacctcggaacggttgttaattacctgggcggcgagcacgatctcgtcaaagccgttgatgttgtggcccacaatgtaaagttccaagaagcgcgggatgcccttgatggaaggcaattttttaagttcctcgtaggtgagctcttcaggggagctgagcccgtgctctgaaagggcccagtctgcaagatgagggttggaagcgacgaatgagctccacaggtcacgggccattagcatttgcaggtggtcgcgaaaggtcctaaactggcgacctatggccattttttctggggtgatgcagtagaaggtaagcgggtcttgttcccagcggtcccatccaaggttcgcggctaggtctcgcgcggcagtcactagaggctcatctccgccgaacttcatgaccagcatgaagggcacgagctgcttcccaaaggcccccatccaagtataggtctctacatcgtaggtgacaaagagacgctcggtgcgaggatgcgagccgatcgggaagaactggatctcccgccaccaattggaggagtggctattgatgtggtgaaagtagaagtccctgcgacgggccgaacactcgtgctggcttttgtaaaaacgtgcgcagtactggcagcggtgcacgggctgtacatcctgcacgaggttgacctgacgaccgcgcacaaggaagcagagtgggaatttgagcccctcgcctggcgggtttggctggtggtcttctacttcggctgcttgtccttgaccgtctggctgctcgaggggagttacggtggatcggaccaccacgccgcgcgagcccaaagtccagatgtccgcgcgcggcggtcggagcttgatgacaacatcgcgcagatgggagctgtccatggtctggagctcccgcggcgtcaggtcaggcgggagctcctgcaggtttacctcgcatagacgggtcagggcgcgggctagatccaggtgatacctaatttccaggggctggttggtggcggcgtcgatggcttgcaagaggccgcatccccgcggcgcgactacggtaccgcgcggcgggcggtgggccgcgggggtgtccttggatgatgcatctaaaagcggtgacgcgggcgagcccccggaggtagggggggctccggacccgccgggagagggggcaggggcacgtcggcgccgcgcgcgggcaggagctggtgctgcgcgcgtaggttgctggcgaacgcgacgacgcggcggttgatctcctgaatctggcgcctctgcgtgaagacgacgggcccggtgagcttgaacctgaaagagagttcgacagaatcaatttcggtgtcgttgacggcggcctggcgcaaaatctcctgcacgtctcctgagttgtcttgataggcgatctcggccatgaactgctcgatctcttcctcctggagatctccgcgtccggctcgctccacggtggcggcgaggtcgttggaaatgcgggccatgagctgcgagaaggcgttgaggcctccctcgttccagacgcggctgtagaccacgcccccttcggcatcgcgggcgcgcatgaccacctgcgcgagattgagctccacgtgccgggcgaagacggcgtagtttcgcaggcgctgaaagaggtagttgagggtggtggcggtgtgttctgccacgaagaagtacataacccagcgtcgcaacgtggattcgttgatatcccccaaggcctcaaggcgctccatggcctcgtagaagtccacggcgaagttgaaaaactgggagttgcgcgccgacacggttaactcctcctccagaagacggatgagctcggcgacagtgtcgcgcacctcgcgctcaaaggctacaggggcctcttcttcttcttcaatctcctcttccataagggcctccccttcttcttcttctggcggcggtgggggaggggggacacggcggcgacgacggcgcaccgggaggcggtcgacaaagcgctcgatcatctccccgcggcgacggcgcatggtctcggtgacggcgcggccgttctcgcgggggcgcagttggaagacgccgcccgtcatgtcccggttatgggttggcggggggctgccatgcggcagggatacggcgctaacgatgcatctcaacaattgttgtgtaggtactccgccgccgagggacctgagcgagtccgcatcgaccggatcggaaaacctctcgagaaaggcgtctaaccagtcacagtcgcaaggtaggctgagcaccgtggcgggcggcagcgggcggcggtcggggttgtttctggcggaggtgctgctgatgatgtaattaaagtaggcggtcttgagacggcggatggtcgacagaagcaccatgtccttgggtccggcctgctgaatgcgcaggcggtcggccatgccccaggcttcgttttgacatcggcgcaggtctttgtagtagtcttgcatgagcctttctaccggcacttcttcttctccttcctcttgtcctgcatctcttgcatctatcgctgcggcggcggcggagtttggccgtaggtggcgccctcttcctcccatgcgtgtgaccccgaagcccctcatcggctgaagcagggctaggtcggcgacaacgcgctcggctaatatggcctgctgcacctgcgtgagggtagactggaagtcatccatgtccacaaagcggtggtatgcgcccgtgttgatggtgtaagtgcagttggccataacggaccagttaacggtctggtgacccggctgcgagagctcggtgtacctgagacgcgagtaagccctcgagtcaaatacgtagtcgttgcaagtccgcaccaggtactggtatcccaccaaaaagtgcggcggcggctggcggtagaggggccagcgtagggtggccggggctccgggggcgagatcttccaacataaggcgatgatatccgtagatgtacctggacatccaggtgatgccggcggcggtggtggaggcgcgcggaaagtcgcggacgcggttccagatgttgcgcagcggcaaaaagtgctccatggtcgggacgctctggccggtcaggcgcgcgcaatcgttgacgctctagcgtgcaaaaggagagcctgtaagcgggcactcttccgtggtctggtggataaattcgcaagggtatcatggcggacgaccggggttcgagccccgtatccggccgtccgccgtgatccatgcggttaccgcccgcgtgtcgaacccaggtgtgcgacgtcagacaacgggggagtgctccttttggcttccttccaggcgcggcggctgctgcgctagcttttttggccactggccgcgcgcagcgtaagcggttaggctggaaagcgaaagcattaagtggctcgctccctgtagccggagggttattttccaagggttgagtcgcgggacccccggttcgagtctcggaccggccggactgcggcgaacgggggtttgcctccccgtcatgcaagaccccgcttgcaaattcctccggaaacagggacgagccccttttttgcttttcccagatgcatccggtgctgcggcagatgcgcccccctcctcagcagcggcaagagcaagagcagcggcagacatgcagggcaccctcccctcctcctaccgcgtcaggaggggcgacatccgcggttgacgcggcagcagatggtgattacgaacccccgcggcgccgggcccggcactacctggacttggaggagggcgagggcctggcgcggctaggagcgccctctcctgagcggcacccaagggtgcagctgaagcgtgatacgcgtgaggcgtacgtgccgcggcagaacctgtttcgcgaccgcgagggagaggagcccgaggagatgcgggatcgaaagttccacgcagggcgcgagctgcggcatggcctgaatcgcgagcggttgctgcgcgaggaggactttgagcccgacgcgcgaaccgggattagtcccgcgcgcgcacacgtggcggccgccgacctggtaaccgcatacgagcagacggtgaaccaggagattaactttcaaaaaagctttaacaaccacgtgcgtacgcttgtggcgcgcgaggaggtggctataggactgatgcatctgtgggactttgtaagcgcgctggagcaaaacccaaatagcaagccgctcatggcgcagctgttccttatagtgcagcacagcagggacaacgaggcattcagggatgcgctgctaaacatagtagagcccgagggccgctggctgctcgatttgataaacatcctgcagagcatagtggtgcaggagcgcagcttgagcctggctgacaaggtggccgccatcaactattccatgcttagcctgggcaagttttacgcccgcaagatataccataccccttacgttcccatagacaaggaggtaaagatcgaggggttctacatgcgcatggcgctgaaggtgcttaccttgagcgacgacctgggcgtttatcgcaacgagcgcatccacaaggccgtgagcgtgagccggcggcgcgagctcagcgaccgcgagctgatgcacagcctgcaaagggccctggctggcacgggcagcggcgatagagaggccgagtcctactttgacgcgggcgctgacctgcgctgggccccaagccgacgcgccctggaggcagctggggccggacctgggctggcggtggcacccgcgcgcgctggcaacgtcggcggcgtggaggaatatgacgaggacgatgagtacgagccagaggacggcgagtactaagcggtgatgtttctgatcagatgatgcaagacgcaacggacccggcggtgcgggcggcgctgcagagccagccgtccggccttaactccacggacgactggcgccaggtcatggaccgcatcatgtcgctgactgcgcgcaatcctgacgcgttccggcagcagccgcaggccaaccggctctccgcaattctggaagcggtggtcccggcgcgcgcaaaccccacgcacgagaaggtgctggcgatcgtaaacgcgctggccgaaaacagggccatccggcccgacgaggccggcctggtctacgacgcgctgcttcagcgcgtggctcgttacaacagcggcaacgtgcagaccaacctggaccggctggtgggggatgtgcgcgaggccgtggcgcagcgtgagcgcgcgcagcagcagggcaacctgggctccatggttgcactaaacgccttcctgagtacacagcccgccaacgtgccgcggggacaggaggactacaccaactttgtgagcgcactgcggctaatggtgactgagacaccgcaaagtgaggtgtaccagtctgggccagactattttttccagaccagtagacaaggcctgcagaccgtaaacctgagccaggctttcaaaaacttgcaggggctgtggggggtgcgggctcccacaggcgaccgcgcgaccgtgtctagcttgctgacgcccaactcgcgcctgttgctgctgctaatagcgcccttcacggacagtggcagcgtgtcccgggacacatacctaggtcacttgctgacactgtaccgcgaggccataggtcaggcgcatgtggacgagcatactttccaggagattacaagtgtcagccgcgcgctggggcaggaggacacgggcagcctggaggcaaccctaaactacctgctgaccaaccggcggcagaagatcccctcgttgcacagtttaaacagcgaggaggagcgcattttgcgctacgtgcagcagagcgtgagccttaacctgatgcgcgacggggtaacgcccagcgtggcgctggacatgaccgcgcgcaacatggaaccgggcatgtatgcctcaaaccggccgtttatcaaccgcctaatggactacttgcatcgcgcggccgccgtgaaccccgagtatttcaccaatgccatcttgaacccgcactggctaccgccccctggtttctacaccgggggattcgaggtgcccgagggtaacgatggattcctctgggacgacatagacgacagcgtgttttccccgcaaccgcagaccctgctagagttgcaacagcgcgagcaggcagaggcggcgctgcgaaaggaaagcttccgcaggccaagcagcttgtccgatctaggcgctgcggccccgcggtcagatgctagtagcccatttccaagcttgatagggtctcttaccagcactcgcaccacccgcccgcgcctgctgggcgaggaggagtacctaaacaactcgctgctgcagccgcagcgcgaaaaaaacctgcctccggcatttcccaacaacgggatagagagcctagtggacaagatgagtagatggaagacgtacgcgcaggagcacagggacgtgccaggcccgcgcccgcccacccgtcgtcaaaggcacgaccgtcagcggggtctggtgtgggaggacgatgactcggcagacgacagcagcgtcctggatttgggagggagtggcaacccgtttgcgcaccttcgccccaggctggggagaatgttttaaaaaaaaaaaagcatgatgcaaaataaaaaactcaccaaggccatggcaccgagcgttggttttcttgtattccccttagtatgcggcgcgcggcgatgtatgaggaaggtcctcctccctcctacgagagtgtggtgagcgcggcgccagtggcggcggcgctgggttctcccttcgatgctcccctggacccgccgtttgtgcctccgcggtacctgcggcctaccggggggagaaacagcatccgttactctgagttggcacccctattcgacaccacccgtgtgtacctggtggacaacaagtcaacggatgtggcatccctgaactaccagaacgaccacagcaactttctgaccacggtcattcaaaacaatgactacagcccgggggaggcaagcacacagaccatcaatcttgacgaccggtcgcactggggcggcgacctgaaaaccatcctgcataccaacatgccaaatgtgaacgagttcatgtttaccaataagtttaaggcgcgggtgatggtgtcgcgcttgcctactaaggacaatcaggtggagctgaaatacgagtgggtggagttcacgctgcccgagggcaactactccgagaccatgaccatagaccttatgaacaacgcgatcgtggagcactacttgaaagtgggcagacagaacggggttctggaaagcgacatcggggtaaagtttgacacccgcaacttcagactggggtttgaccccgtcactggtcttgtcatgcctggggtatatacaaacgaagccttccatccagacatcattttgctgccaggatgcggggtggacttcacccacagccgcctgagcaacttgttgggcatccgcaagcggcaacccttccaggagggctttaggatcacctacgatgatctggagggtggtaacattcccgcactgttggatgtggacgcctaccaggcgagcttgaaagatgacaccgaacagggcgggggtggcgcaggcggcagcaacagcagtggcagcggcgcggaagagaactccaacgcggcagccgcggcaatgcagccggtggaggacatgaacgatcatgccattcgcggcgacacctttgccacacgggctgaggagaagcgcgctgaggccgaagcagcggccgaagctgccgcccccgctgcgcaacccgaggtcgagaagcctcagaagaaaccggtgatcaaacccctgacagaggacagcaagaaacgcagttacaacctaataagcaatgacagcaccttcacccagtaccgcagctggtaccttgcatacaactacggcgaccctcagaccggaatccgctcatggaccctgctttgcactcctgacgtaacctgcggctcggagcaggtctactggtcgttgccagacatgatgcaagaccccgtgaccttccgctccacgcgccagatcagcaactttccggtggtgggcgccgagctgttgcccgtgcactccaagagcttctacaacgaccaggccgtctactcccaactcatccgccagtttacctctctgacccacgtgttcaatcgctttcccgagaaccagattttggcgcgcccgccagcccccaccatcaccaccgtcagtgaaaacgttcctgctctcacagatcacgggacgctaccgctgcgcaacagcatcggaggagtccagcgagtgaccattactgacgccagacgccgcacctgcccctacgtttacaaggccctgggcatagtctcgccgcgcgtcctatcgagccgcactttttgagcaagcatgtccatccttatatcgcccagcaataacacaggctggggcctgcgcttcccaagcaagatgtttggcggggccaagaagcgctccgaccaacacccagtgcgcgtgcgcgggcactaccgcgcgccctggggcgcgcacaaacgcggccgcactgggcgcaccaccgtcgatgacgccatcgacgcggtggtggaggaggcgcgcaactacacgcccacgccgccaccagtgtccacagtggacgcggccattcagaccgtggtgcgcggagcccggcgctatgctaaaatgaagagacggcggaggcgcgtagcacgtcgccaccgccgccgacccggcactgccgcccaacgcgcggcggcggccctgcttaaccgcgcacgtcgcaccggccgacgggcggccatgcgggccgctcgaaggctggccgcgggtattgtcactgtgccccccaggtccaggcgacgagcggccgccgcagcagccgcggccattagtgctatgactcagggtcgcaggggcaacgtgtattgggtgcgcgactcggttagcggcctgcgcgtgcccgtgcgcacccgccccccgcgcaactagattgcaagaaaaaactacttagactcgtactgttgtatgtatccagcggcggcggcgcgcaacgaagctatgtccaagcgcaaaatcaaagaagagatgctccaggtcatcgcgccggagatctatggccccccgaagaaggaagagcaggattacaagccccgaaagctaaagcgggtcaaaaagaaaaagaaagatgatgatgatgaacttgacgacgaggtggaactgctgcacgctaccgcgcccaggcgacgggtacagtggaaaggtcgacgcgtaaaacgtgttttgcgacccggcaccaccgtagtctttacgcccggtgagcgctccacccgcacctacaagcgcgtgtatgatgaggtgtacggcgacgaggacctgcttgagcaggccaacgagcgcctcggggagtttgcctacggaaagcggcataaggacatgctggcgttgccgctggacgagggcaacccaacacctagcctaaagcccgtaacactgcagcaggtgctgcccgcgcttgcaccgtccgaagaaaagcgcggcctaaagcgcgagtctggtgacttggcacccaccgtgcagctgatggtacccaagcgccagcgactggaagatgtcttggaaaaaatgaccgtggaacctgggctggagcccgaggtccgcgtgcggccaatcaagcaggtggcgccgggactgggcgtgcagaccgtggacgttcagatacccactaccagtagcaccagtattgccaccgccacagagggcatggagacacaaacgtccccggttgcctcagcggtggcggatgccgcggtgcaggcggtcgctgcggccgcgtccaagacctctacggaggtgcaaacggacccgtggatgtttcgcgtttcagccccccggcgcccgcgccgttcgaggaagtacggcgccgccagcgcgctactgcccgaatatgccctacatccttccattgcgcctacccccggctatcgtggctacacctaccgccccagaagacgagcaactacccgacgccgaaccaccactggaacccgccgccgccgtcgccgtcgccagcccgtgctggccccgatttccgtgcgcagggtggctcgcgaaggaggcaggaccctggtgctgccaacagcgcgctaccaccccagcatcgtttaaaagccggtctttgtggttcttgcagatatggccctcacctgccgcctccgtttcccggtgccgggattccgaggaagaatgcaccgtaggaggggcatggccggccacggcctgacgggcggcatgcgtcgtgcgcaccaccggcggcggcgcgcgtcgcaccgtcgcatgcgcggcggtatcctgcccctccttattccactgatcgccgcggcgattggcgccgtgcccggaattgcatccgtggccttgcaggcgcagagacactgattaaaaacaagttgcatgtggaaaaatcaaaataaaaagtctggactctcacgctcgcttggtcctgtaactattttgtagaatggaagacatcaactttgcgtctctggccccgcgacacggctcgcgcccgttcatgggaaactggcaagatatcggcaccagcaatatgagcggtggcgccttcagctggggctcgctgtggagcggcattaaaaatttcggttccaccgttaagaactatggcagcaaggcctggaacagcagcacaggccagatgctgagggataagttgaaagagcaaaatttccaacaaaaggtggtagatggcctggcctctggcattagcggggtggtggacctggccaaccaggcagtgcaaaataagattaacagtaagcttgatccccgccctcccgtagaggagcctccaccggccgtggagacagtgtctccagaggggcgtggcgaaaagcgtccgcgccccgacagggaagaaactctggtgacgcaaatagacgagcctccctcgtacgaggaggcactaaagcaaggcctgcccaccacccgtcccatcgcgcccatggctaccggagtgctgggccagcacacacccgtaacgctggacctgcctccccccgccgacacccagcagaaacctgtgctgccaggcccgaccgccgttgttgtaacccgtcctagccgcgcgtccctgcgccgcgccgccagcggtccgcgatcgttgcggcccgtagccagtggcaactggcaaagcacactgaacagcatcgtgggtctgggggtgcaatccctgaagcgccgacgatgcttctgatagctaacgtgtcgtatgtgtgtcatgtatgcgtccatgtcgccgccagaggagctgctgagccgccgcgcgcccgctttccaagatggctaccccttcgatgatgccgcagtggtcttacatgcacatctcgggccaggacgcctcggagtacctgagccccgggctggtgcagtttgcccgcgccaccgagacgtacttcagcctgaataacaagtttagaaaccccacggtggcgcctacgcacgacgtgaccacagaccggtcccagcgtttgacgctgcggttcatccctgtggaccgtgaggatactgcgtactcgtacaaggcgcggttcaccctagctgtgggtgataaccgtgtgctggacatggcttccacgtactttgacatccgcggcgtgctggacaggggccctacttttaagccctactctggcactgcctacaacgccctggctcccaagggtgccccaaatccttgcgaatgggatgaagctgctactgctcttgaaataaacctagaagaagaggacgatgacaacgaagacgaagtagacgagcaagctgagcagcaaaaaactcacgtatttgggcaggcgccttattctggtataaatattacaaaggagggtattcaaataggtgtcgaaggtcaaacacctaaatatgccgataaaacatttcaacctgaacctcaaataggagaatctcagtggtacgaaacagaaattaatcatgcagctgggagagtcctaaaaaagactaccccaatgaaaccatgttacggttcatatgcaaaacccacaaatgaaaatggagggcaaggcattcttgtaaagcaacaaaatggaaagctagaaagtcaagtggaaatgcaatttttctcaactactgaggcagccgcaggcaatggtgataacttgactcctaaagtggtattgtacagtgaagatgtagatatagaaaccccagacactcatatttcttacatgcccactattaaggaaggtaactcacgagaactaatgggccaacaatctatgcccaacaggcctaattacattgcttttagggacaattttattggtctaatgtattacaacagcacgggtaatatgggtgttctggcgggccaagcatcgcagttgaatgctgttgtagatttgcaagacagaaacacagagctttcataccagcttttgcttgattccattggtgatagaaccaggtacttttctatgtggaatcaggctgttgacagctatgatccagatgttagaattattgaaaatcatggaactgaagatgaacttccaaattactgctttccactgggaggtgtgattaatacagagactcttaccaaggtaaaacctaaaacaggtcaggaaaatggatgggaaaaagatgctacagaattttcagataaaaatgaaataagagttggaaataattttgccatggaaatcaatctaaatgccaacctgtggagaaatttcctgtactccaacatagcgctgtatttgcccgacaagctaaagtacagtccttccaacgtaaaaatttctgataacccaaacacctacgactacatgaacaagcgagtggtggctcccgggctagtggactgctacattaaccttggagcacgctggtcccttgactatatggacaacgtcaacccatttaaccaccaccgcaatgctggcctgcgctaccgctcaatgttgctgggcaatggtcgctatgtgcccttccacatccaggtgcctcagaagttctttgccattaaaaacctccttctcctgccgggctcatacacctacgagtggaacttcaggaaggatgttaacatggttctgcagagctccctaggaaatgacctaagggttgacggagccagcattaagtttgatagcatttgcctttacgccaccttcttccccatggcccacaacaccgcctccacgcttgaggccatgcttagaaacgacaccaacgaccagtcctttaacgactatctctccgccgccaacatgctctaccctatacccgccaacgctaccaacgtgcccatatccatcccctcccgcaactgggcggctttccgcggctgggccttcacgcgccttaagactaaggaaaccccatcactgggctcgggctacgacccttattacacctactctggctctataccctacctagatggaaccttttacctcaaccacacctttaagaaggtggccattacctttgactcttctgtcagctggcctggcaatgaccgcctgcttacccccaacgagtttgaaattaagcgctcagttgacggggagggttacaacgttgcccagtgtaacatgaccaaagactggttcctggtacaaatgctagctaactataacattggctaccagggcttctatatcccagagagctacaaggaccgcatgtactccttctttagaaacttccagcccatgagccgtcaggtggtggatgatactaaatacaaggactaccaacaggtgggcatcctacaccaacacaacaactctggatttgttggctaccttgcccccaccatgcgcgaaggacaggcctaccctgctaacttcccctatccgcttataggcaagaccgcagttgacagcattacccagaaaaagtttctttgcgatcgcaccctttggcgcatcccattctccagtaactttatgtccatgggcgcactcacagacctgggccaaaaccttctctacgccaactccgcccacgcgctagacatgacttttgaggtggatcccatggacgagcccacccttctttatgttttgtttgaagtctttgacgtggtccgtgtgcaccagccgcaccgcggcgtcatcgaaaccgtgtacctgcgcacgcccttctcggccggcaacgccacaacataaagaagcaagcaacatcaacaacagctgccgccatgggctccagtgagcaggaactgaaagccattgtcaaagatcttggttgtgggccatattttttgggcacctatgacaagcgctttccaggctttgtttctccacacaagctcgcctgcgccatagtcaatacggccggtcgcgagactgggggcgtacactggatggcctttgcctggaacccgcactcaaaaacatgctacctctttgagccctttggcttttctgaccagcgactcaagcaggtttaccagtttgagtacgagtcactcctgcgccgtagcgccattgcttcttcccccgaccgctgtataacgctggaaaagtccacccaaagcgtacaggggcccaactcggccgcctgtggactattctgctgcatgtttctccacgcctttgccaactggccccaaactcccatggatcacaaccccaccatgaaccttattaccggggtacccaactccatgctcaacagtccccaggtacagcccaccctgcgtcgcaaccaggaacagctctacagcttcctggagcgccactcgccctacttccgcagccacagtgcgcagattaggagcgccacttctttttgtcacttgaaaaacatgtaaaaataatgtactagagacactttcaataaaggcaaatgcttttatttgtacactctcgggtgattatttacccccacccttgccgtctgcgccgtttaaaaatcaaaggggttctgccgcgcatcgctatgcgccactggcagggacacgttgcgatactggtgtttagtgctccacttaaactcaggcacaaccatccgcggcagctcggtgaagttttcactccacaggctgcgcaccatcaccaacgcgtttagcaggtcgggcgccgatatcttgaagtcgcagttggggcctccgccctgcgcgcgcgagttgcgatacacagggttgcagcactggaacactatcagcgccgggtggtgcacgctggccagcacgctcttgtcggagatcagatccgcgtccaggtcctccgcgttgctcagggcgaacggagtcaactttggtagctgccttcccaaaaagggcgcgtgcccaggctttgagttgcactcgcaccgtagtggcatcaaaaggtgaccgtgcccggtctgggcgttaggatacagcgcctgcataaaagccttgatctgcttaaaagccacctgagcctttgcgccttcagagaagaacatgccgcaagacttgccggaaaactgattggccggacaggccgcgtcgtgcacgcagcaccttgcgtcggtgttggagatctgcaccacatttcggccccaccggttcttcacgatcttggccttgctagactgctccttcagcgcgcgctgcccgttttcgctcgtcacatccatttcaatcacgtgctccttatttatcataatgcttccgtgtagacacttaagctcgccttcgatctcagcgcagcggtgcagccacaacgcgcagcccgtgggctcgtgatgcttgtaggtcacctctgcaaacgactgcaggtacgcctgcaggaatcgccccatcatcgtcacaaaggtcttgttgctggtgaaggtcagctgcaacccgcggtgctcctcgttcagccaggtcttgcatacggccgccagagcttccacttggtcaggcagtagtttgaagttcgcctttagatcgttatccacgtggtacttgtccatcagcgcgcgcgcagcctccatgcccttctcccacgcagacacgatcggcacactcagcgggttcatcaccgtaatttcactttccgcttcgctgggctcttcctcttcctcttgcgtccgcataccacgcgccactgggtcgtcttcattcagccgccgcactgtgcgcttacctcctttgccatgcttgattagcaccggtgggttgctgaaacccaccatttgtagcgccacatcttctctttcttcctcgctgtccacgattacctctggtgatggcgggcgctcgggcttgggagaagggcgcttctttttcttcttgggcgcaatggccaaatccgccgccgaggtcgatggccgcgggctgggtgtgcgcggcaccagcgcgtcttgtgatgagtcttcctcgtcctcggactcgatacgccgcctcatccgcttttttgggggcgcccggggaggcggcggcgacggggacggggacgacacgtcctccatggttgggggacgtcgcgccgcaccgcgtccgcgctcgggggtggtttcgcgctgctcctcttcccgactggccatttccttctcctataggcagaaaaagatcatggagtcagtcgagaagaaggacagcctaaccgccccctctgagttcgccaccaccgcctccaccgatgccgccaacgcgcctaccaccttccccgtcgaggcacccccgcttgaggaggaggaagtgattatcgagcaggacccaggttttgtaagcgaagacgacgaggaccgctcagtaccaacagaggataaaaagcaagaccaggacaacgcagaggcaaacgaggaacaagtcgggcggggggacgaaaggcatggcgactacctagatgtgggagacgacgtgctgttgaagcatctgcagcgccagtgcgccattatctgcgacgcgttgcaagagcgcagcgatgtgcccctcgccatagcggatgtcagccttgcctacgaacgccacctattctcaccgcgcgtaccccccaaacgccaagaaaacggcacatgcgagcccaacccgcgcctcaacttctaccccgtatttgccgtgccagaggtgcttgccacctatcacatctttttccaaaactgcaagatacccctatcctgccgtgccaaccgcagccgagcggacaagcagctggccttgcggcagggcgctgtcatacctgatatcgcctcgctcaacgaagtgccaaaaatctttgagggtcttggacgcgacgagaagcgcgcggcaaacgctctgcaacaggaaaacagcgaaaatgaaagtcactctggagtgttggtggaactcgagggtgacaacgcgcgcctagccgtactaaaacgcagcatcgaggtcacccactttgcctacccggcacttaacctaccccccaaggtcatgagcacagtcatgagtgagctgatcgtgcgccgtgcgcagcccctggagagggatgcaaatttgcaagaacaaacagaggagggcctacccgcagttggcgacgagcagctagcgcgctggcttcaaacgcgcgagcctgccgacttggaggagcgacgcaaactaatgatggccgcagtgctcgttaccgtggagcttgagtgcatgcagcggttctttgctgacccggagatgcagcgcaagctagaggaaacattgcactacacctttcgacagggctacgtacgccaggcctgcaagatctccaacgtggagctctgcaacctggtctcctaccttggaattttgcacgaaaaccgccttgggcaaaacgtgcttcattccacgctcaagggcgaggcgcgccgcgactacgtccgcgactgcgtttacttatttctatgctacacctggcagacggccatgggcgtttggcagcagtgcttggaggagtgcaacctcaaggagctgcagaaactgctaaagcaaaacttgaaggacctatggacggccttcaacgagcgctccgtggccgcgcacctggcggacatcattttccccgaacgcctgcttaaaaccctgcaacagggtctgccagacttcaccagtcaaagcatgttgcagaactttaggaactttatcctagagcgctcaggaatcttgcccgccacctgctgtgcacttcctagcgactttgtgcccattaagtaccgcgaatgccctccgccgctttggggccactgctaccttctgcagctagccaactaccttgcctaccactctgacataatggaagacgtgagcggtgacggtctactggagtgtcactgtcgctgcaacctatgcaccccgcaccgctccctggtttgcaattcgcagctgcttaacgaaagtcaaattatcggtacctttgagctgcagggtccctcgcctgacgaaaagtccgcggctccggggttgaaactcactccggggctgtggacgtcggcttaccttcgcaaatttgtacctgaggactaccacgcccacgagattaggttctacgaagaccaatcccgcccgcctaatgcggagcttaccgcctgcgtcattacccagggccacattcttggccaattgcaagccatcaacaaagcccgccaagagtttctgctacgaaagggacggggggtttacttggacccccagtccggcgaggagctcaacccaatccccccgccgccgcagccctatcagcagcagccgcgggcccttgcttcccaggatggcacccaaaaagaagctgcagctgccgccgccacccacggacgaggaggaatactgggacagtcaggcagaggaggttttggacgaggaggaggaggacatgatggaagactgggagagcctagacgaggaagcttccgaggtcgaagaggtgtcagacgaaacaccgtcaccctcggtcgcattcccctcgccggcgccccagaaatcggcaaccggttccagcatggctacaacctccgctcctcaggcgccgccggcactgcccgttcgccgacccaaccgtagatgggacaccactggaaccagggccggtaagtccaagcagccgccgccgttagcccaagagcaacaacagcgccaaggctaccgctcatggcgcgggcacaagaacgccatagttgcttgcttgcaagactgtgggggcaacatctccttcgcccgccgctttcttctctaccatcacggcgtggccttcccccgtaacatcctgcattactaccgtcatctctacagcccatactgcaccggcggcagcggcagcaacagcagcggccacacagaagcaaaggcgaccggatagcaagactctgacaaagcccaagaaatccacagcggcggcagcagcaggaggaggagcgctgcgtctggcgcccaacgaacccgtatcgacccgcgagcttagaaacaggatttttcccactctgtatgctatatttcaacagagcaggggccaagaacaagagctgaaaataaaaaacaggtctctgcgatccctcacccgcagctgcctgtatcacaaaagcgaagatcagcttcggcgcacgctggaagacgcggaggctctcttcagtaaatactgcgcgctgactcttaaggactagtttcgcgccctttctcaaatttaagcgcgaaaactacgtcatctccagcggccacacccggcgccagcacctgttgtcagcgccattatgagcaaggaaattcccacgccctacatgtggagttaccagccacaaatgggacttgcggctggagctgcccaagactactcaacccgaataaactacatgagcgcgggaccccacatgatatcccgggtcaacggaatacgcgcccaccgaaaccgaattctcctggaacaggcggctattaccaccacacctcgtaataaccttaatccccgtagttggcccgctgccctggtgtaccaggaaagtcccgctcccaccactgtggtacttcccagagacgcccaggccgaagttcagatgactaactcaggggcgcagcttgcgggcggctttcgtcacagggtgcggtcgcccgggcagggtataactcacctgacaatcagagggcgaggtattcagctcaacgacgagtcggtgagctcctcgcttggtctccgtccggacgggacatttcagatcggcggcgccggccgctcttcattcacgcctcgtcaggcaatcctaactctgcagacctcgtcctctgagccgcgctctggaggcattggaactctgcaatttattgaggagtttgtgccatcggtctactttaaccccttctcgggacctcccggccactatccggatcaatttattcctaactttgacgcggtaaaggactcggcggacggctacgactgaatgttaagtggagaggcagagcaactgcgcctgaaacacctggtccactgtcgccgccacaagtgctttgcccgcgactccggtgagttttgctactttgaattgcccgaggatcatatcgagggcccggcgcacggcgtccggcttaccgcccagggagagcttgcccgtagcctgattcgggagtttacccagcgccccctgctagttgagcgggacaggggaccctgtgttctcactgtgatttgcaactgtcctaaccctggattacatcaagatcctctagttaatgtcaggtcgcctaagtcgattaactagagtacccggggatcttattccctttaactaataaaaaaaaataataaagcatcacttacttaaaatcagttagcaaatttctgtccagtttattcagcagcacctccttgccctcctcccagctctggtattgcagcttcctcctggctgcaaactttctccacaatctaaatggaatgtcagtttcctcctgttcctgtccatccgcacccactatcttcatgttgttgcagatgaagcgcgcaagaccgtctgaagataccttcaaccccgtgtatccatatgacacggaaaccggtcctccaactgtgccttttcttactcctccctttgtatcccccaatgggtttcaagagagtccccctggggtactctctttgcgcctatccgaacctctagttacctccaatggcatgcttgcgctcaaaatgggcaacggcctctctctggacgaggccggcaaccttacctcccaaaatgtaaccactgtgagcccacctctcaaaaaaaccaagtcaaacataaacctggaaatatctgcacccctcacagttacctcagaagccctaactgtggctgccgccgcacctctaatggtcgcgggcaacacactcaccatgcaatcacaggccccgctaaccgtgcacgactccaaacttagcattgccacccaaggacccctcacagtgtcagaaggaaagctagccctgcaaacatcaggccccctcaccaccaccgatagcagtacccttactatcactgcctcaccccctctaactactgccactggtagcttgggcattgacttgaaagagcccatttatacacaaaatggaaaactaggactaaagtacggggctcctttgcatgtaacagacgacctaaacactttgaccgtagcaactggtccaggtgtgactattaataatacttccttgcaaactaaagttactggagccttgggttttgattcacaaggcaatatgcaacttaatgtagcaggaggactaaggattgattctcaaaacagacgccttatacttgatgttagttatccgtttgatgctcaaaaccaactaaatctaagactaggacagggccctctttttataaactcagcccacaacttggatattaactacaacaaaggcctttacttgtttacagcttcaaacaattccaaaaagcttgaggttaacctaagcactgccaaggggttgatgtttgacgctacagccatagccattaatgcaggagatgggcttgaatttggttcacctaatgcaccaaacacaaatcccctcaaaacaaaaattggccatggcctagaatttgattcaaacaaggctatggttcctaaactaggaactggccttagttttgacagcacaggtgccattacagtaggaaacaaaaataatgataagctaactttgtggaccggaataaaccctccacctaactgtcaaattgtggaaaacactaatacaaatgatggcaaacttactttagtattagtaaaaaatggagggcttgttaatggctacgtgtctctagttggtgtatcagacactgtgaaccaaatgttcacacaaaagacagcaaacatccaattaagattatattttgactcttctggaaatctattaactgaggaatcagacttaaaaattccacttaaaaataaatcttctacagcgaccagtgaaactgtagccagcagcaaagcctttatgccaagtactacagcttatcccttcaacaccactactagggatagtgaaaactacattcatggaatatgttactacatgactagttatgatagaagtctatttcccttgaacatttctataatgctaaacagccgtatgatttcttccaatgttgcctatgccatacaatttgaatggaatctaaatgcaagtgaatctccagaaagcaacatagctacgctgaccacatccccctttttcttttcttacattacagaagacgacaactaaagaatcgtttgtgttatgtttcaacgtgtttatttttcaattgcagaaaatttcaagtcatttttcattcagtagtatagccccaccaccacatagcttatacagatcaccgtaccttaatcaaacgtttttttttttattccaaaagattatccaaaacctcaaaatgaagatctattaagtgaacgcgctcccctccggtggcgtggtcaaactctacagccaaagaacagataatggcatttgtaagatgttgcacaatggcttccaaaaggcaaacggccctcacgtccaagtggacgtaaaggctaaacccttcagggtgaatctcctctataaacattccagcaccttcaaccatgcccaaataattctcatctcgccaccttctcaatatatctctaagcaaatcccgaatattaagtccggccattgtaaaaatctgctccagagcgccctccaccttcagcctcaagcagcgaatcatgattgcaaaaattcaggttcctcacagacctgtataagattcaaaagcggaacattaacaaaaataccgcgatcccgtaggtcccttcgcagggccagctgaacataatcgtgcaggtctgcacggaccagcgcggccacttccccgccaggaaccatgacaaaagaacccacactgattatgacacgcatactcggagctatgctaaccagcgtagccccgatgtaagcttgttgcatgggcggcgatataaaatgcaaggtgctgctcaaaaaatcaggcaaagcctcgcgcaaaaaagaaagcacatcgtagtcatgctcatgcagataaaggcaggtaagctccggaaccaccacagaaaaagacaccatttttctctcaaacatgtctgcgggtttctgcataaacacaaaataaaataacaaaaaaacatttaaacattagaagcctgtcttacaacaggaaaaacaacccttataagcataagacggactacggccatgccggcgtgaccgtaaaaaaactggtcaccgtgattaaaaagcaccaccgacagctcctcggtcatgtccggagtcataatgtaagactcggtaaacacatcaggttgattcacatcggtcagtgctaaaaagcgaccgaaatagcccgggggaatacatacccgcaggcgtagagacaacattacagcccccataggaggtataacaaaattaataggagagaaaaacacataaacacctgaaaaaccctcctgcctaggcaaaatagcaccctcccgctccagaacaacatacagcgcttccacagcggcagccataacagtcagccttaccagtaaaaaagaaaacctattaaaaaaacaccactcgacacggcaccagctcaatcagtcacagtgtaaaaaagggccaagtgcagagcgagtatatataggactaaaaaatgacgtaacggttaaagtccacaaaaaacacccagaaaaccgcacgcgaacctacgcccagaaacgaaagccaaaaaacccacaacttcctcaaatcgtcacttccgttttcccacgttacgtcacttcccattttaagaaaactacaattcccaacacatacaagttactccgccctaaaacctacgtcacccgccccgttcccacgccccgcgccacgtcacaaactccaccccctcattatcatattggcttcaatccaaaataaggtatattattgatgatg

SEQ ID NO: 6 - DNA, 37105 bp, Artificial Sequence
  Adk35F2-Spike/E4orf6-E4dl355(E4re#1)
ttaattaacatcatcaataatataccttattttggattgaagccaatatgataatgagggggtggagtttgtgacgtggcgcggggcgtgggaacggggcgggtgacgtagtagtgtggcggaagtgtgatgttgcaagtgtggcggaacacatgtaagcgacggatgtggcaaaagtgacgtttttggtgtgcgccggtgtacacaggaagtgacaattttcgcgcggttttaggcggatgttgtagtaaatttgggcgtaaccgagtaagatttggccattttcgcgggaaaactgaataagaggaagtgaaatctgaataattttgtgttactcatagcgcgtaataatttctgtaatagtaatcaattacggggtcattagttcatagcccatatatggagttccgcgttacataacttacggtaaatggcccgcctggctgaccgcccaacgacccccgcccattgacgtcaataatgacgtatgttcccatagtaacgccaatagggactttccattgacgtcaatgggtggagtatttacggtaaactgcccacttggcagtacatcaagtgtatcatatgccaagtacgccccctattgacgtcaatgacggtaaatggcccgcctggcattatgcccagtacatgaccttatgggactttcctacttggcagtacatctacgtattagtcatcgctattaccatggtgatgcggttttggcagtacatcaatgggcgtggatagcggtttgactcacggggatttccaagtctccaccccattgacgtcaatgggagtttgttttggcaccaaaatcaacgggactttccaaaatgtcgtaacaactccgccccattgacgcaaatgggcggtaggcgtgtacggtgggaggtctatataagcagagctctccctatcagtgatagagatctccctatcagtgatagagatcgtcgacgagctcgtttagtgaaccgtcagatcgcctggagacgccatccacgctgttttgacctccatagaagacaccgggaccgatccagcctccgatttgccaccatgtttgtgttcctggtgctgctgccactggtgtccagccagtgtgtgaacctgaccaccaggacccaacttcctcctgcctacaccaactccttcaccaggggagtctactaccctgacaaggtgttcaggtcctctgtgctgcacagcacccaggacctgttcctgccattcttcagcaatgtgacctggttccatgccatccatgtgtctggcaccaatggcaccaagaggtttgacaaccctgtgctgccattcaatgatggagtctactttgccagcacagagaagagcaacatcatcaggggctggatttttggcaccaccctggacagcaagacccagtccctgctgattgtgaacaatgccaccaatgtggtgattaaggtgtgtgagttccagttctgtaatgacccattcctgggagtctactaccacaagaacaacaagtcctggatggagtctgagttcagggtctactcctctgccaacaactgtacctttgaatatgtgagccaaccattcctgatggacttggagggcaagcagggcaacttcaagaacctgagggagtttgtgttcaagaacattgatggctacttcaagatttacagcaaacacacaccaatcaacctggtgagggacctgccacagggcttctctgccttggaaccactggtggacctgccaattggcatcaacatcaccaggttccagaccctgctggctctgcacaggtcctacctgacacctggagactcctcctctggctggacagcaggagcagcagcctactatgtgggctacctccaaccaaggaccttcctgctgaaatacaatgagaatggcaccatcacagatgctgtggactgtgccctggacccactgtctgagaccaagtgtaccctgaaatccttcacagtggagaagggcatctaccagaccagcaacttcagggtccaaccaacagagagcattgtgaggtttccaaacatcaccaacctgtgtccatttggagaggtgttcaatgccaccaggtttgcctctgtctatgcctggaacaggaagaggattagcaactgtgtggctgactactctgtgctctacaactctgcctccttcagcaccttcaagtgttatggagtgagcccaaccaaactgaatgacctgtgtttcaccaatgtctatgctgactcctttgtgattaggggagatgaggtgagacagattgcccctggacaaacaggcaagattgctgactacaactacaaactgcctgatgacttcacaggctgtgtgattgcctggaacagcaacaacctggacagcaaggtgggaggcaactacaactacctctacagactgttcaggaagagcaacctgaaaccatttgagagggacatcagcacagagatttaccaggctggcagcacaccatgtaatggagtggagggcttcaactgttactttccactccaatcctatggcttccaaccaaccaatggagtgggctaccaaccatacagggtggtggtgctgtcctttgaactgctccatgcccctgccacagtgtgtggaccaaagaagagcaccaacctggtgaagaacaagtgtgtgaacttcaacttcaatggactgacaggcacaggagtgctgacagagagcaacaagaagttcctgccattccaacagtttggcagggacattgctgacaccacagatgctgtgagggacccacagaccttggagattctggacatcacaccatgttcctttggaggagtgtctgtgattacacctggcaccaacaccagcaaccaggtggctgtgctctaccaggatgtgaactgtactgaggtgcctgtggctatccatgctgaccaacttacaccaacctggagggtctacagcacaggcagcaatgtgttccagaccagggctggctgtctgattggagcagagcatgtgaacaactcctatgagtgtgacatcccaattggagcaggcatctgtgcctcctaccagacccagaccggtggcggtgggtcgaggtctgtggcaagccagagcatcattgcctacacaatgagtctgggagcagagaactctgtggcttacagcaacaacagcattgccatcccaaccaacttcaccatctctgtgaccacagagattctgcctgtgagtatgaccaagacctctgtggactgtacaatgtatatctgtggagacagcacagagtgtagcaacctgctgctccaatatggctccttctgtacccaacttaacagggctctgacaggcattgctgtggaacaggacaagaacacccaggaggtgtttgcccaggtgaagcagatttacaagacacctccaatcaaggactttggaggcttcaacttcagccagattctgcctgacccaagcaagccaagcaagaggtccttcattgaggacctgctgttcaacaaggtgaccctggctgatgctggcttcatcaagcaatatggagactgtctgggagacattgctgccagggacctgatttgtgcccagaagttcaatggactgacagtgctgcctccactgctgacagatgagatgattgcccaatacacctctgccctgctggctggcaccatcacctctggctggacctttggagcaggagcagccctccaaatcccatttgctatgcagatggcttacaggttcaatggcattggagtgacccagaatgtgctctatgagaaccagaaactgattgccaaccagttcaactctgccattggcaagattcaggactccctgtccagcacagcctctgccctgggcaaactccaagatgtggtgaaccagaatgcccaggctctgaacaccctggtgaagcaactttccagcaactttggagccatctcctctgtgctgaatgacatcctgagcagactggacaaggtggaggctgaggtccagattgacagactgattacaggcagactccaatccctccaaacctatgtgacccaacaacttatcagggctgctgagattagggcatctgccaacctggctgccaccaagatgagtgagtgtgtgctgggacaaagcaagagggtggacttctgtggcaagggctaccacctgatgagttttccacagtctgcccctcatggagtggtgttcctgcatgtgacctatgtgcctgcccaggagaagaacttcaccacagcccctgccatctgccatgatggcaaggctcactttccaagggagggagtgtttgtgagcaatggcacccactggtttgtgacccagaggaacttctatgaaccacagattatcaccacagacaacacctttgtgtctggcaactgtgatgtggtgattggcattgtgaacaacacagtctatgacccactccaacctgaactggactccttcaaggaggaactggacaaatacttcaagaaccacaccagccctgatgtggacctgggagacatctctggcatcaatgcctctgtggtgaacatccagaaggagattgacagactgaatgaggtggctaagaacctgaatgagtccctgattgacctccaagaactgggcaaatatgaacaatacatcaagtggccatgaaaattgatcataatcagccataccacatttgtagaggttttacttgctttaaaaaacctcccacacctccccctgaacctgaaacataaaatgaatgcaattgttgttgttaacttgtttattgcagcttataatggttacaaataaagcaatagcatcacaaatttcacaaataaagcatttttttcactgcattctagttgtggtttgtccaaactcatcaatgtatcttaacgcggatcgctccggtgcccgtcagtgggcagagcgcacatcgcccacagtccccgagaagttggggggaggggtcggcaattgaaccggtgcctagagaaggtggcgcggggtaaactgggaaagtgatgtcgtgtactggctccgcctttttcccgagggtgggggagaaccgtatataagtgcagtagtcgccgtgaacgttctttttcgcaacgggtttgccgccagaacacaggtaagtgccgtgtgtggttcccgcgggcctggcctctttacgggttatggcccttgcgtgccttgaattacttccacgcccctggctgcagtacgtgattcttgatcccgagcttcgggttggaagtgggtgggagagttcgaggccttgcgcttaaggagccccttcgcctcgtgcttgagttgaggcttggcctgggcgctggggccgccgcgtgcgaatctggtggcaccttcgcgcctgtctcgctgctttcgataagtctctagccatttaaaatttttgatgacctgctgcgacgctttttttctggcaagatagtcttgtaaatgcgggccaagatctgcacactggtatttcggtttttggggccgcgggcggcgacggggcccgtgcgtcccagcgcacatgttcggcgaggcggggcctgcgagcgcggccaccgagaatcggacgggggtagtctcaagctggccggcctgctctggtgcctggcctcgcgccgccgtgtatcgccccgccctgggcggcaaggctggcccggtcggcaccagttgcgtgagcggaaagatggccgcttcccggccctgctgcagggagctcaaaatggaggacgcggcgctcgggagagcgggcgggtgagtcacccacacaaaggaaaagggcctttccgtcctcagccgtcgcttcatgtgactccacggagtaccgggcgccgtccaggcacctcgattagttctcgagcttttggagtacgtcgtctttaggttggggggaggggttttatgcgatggagtttccccatactgagtgggtggagactgaagttaggccagcttggcacttgatgtaattctccttggaatttgccctttttgagtttggatcttggttcattctcaagcctcagacagtggttcaaagtttttttcttccatttaaggtgtcgtgaaaactaccccaagctggccaccatgactacgtccggcgttccatttggcatgacactacgaccaacacgatctcggttgtctcggcgcactccgtacagtagggatcgtctacctccttttgagacagaaacccgcgctaccatactggaggatcatccgctgctgcccgaatgtaacactttgacaatgcacaacgtgagttacgtgcgaggtcttccctgcagtgtgggatttacgctgattcaggaatgggttgttccctgggatatggttctaacgcgggaggagcttgtaatcctgaggaagtgtatgcacgtgtgcctgtgttgtgccaacattgatatcatgacgagcatgatgatccatggttacgagtcctgggctctccactgtcattgttccagtcccggttccctgcagtgtatagccggcgggcaggttttggccagctggtttaggatggtggtggatggcgccatgtttaatcagaggtttatatggtaccgggaggtggtgaattacaacatgccaaaagaggtaatgtttatgtccagcgtgtttatgaggggtcgccacttaatctacctgcgcttgtggtatgatggccacgtgggttctgtggtccccgccatgagctttggatacagcgccttgcactgtgggattttgaacaatattgtggtgctgtgctgcagttactgtgctgatttaagtgagatcagggtgcgctgctgtgcccggaggacaaggcgccttatgctgcgggcggtgcgaatcatcgctgaggagaccactgccatgttgtattcctgcaggacggagcggcggcggcagcagtttattcgcgcgctgctgcagcaccaccgccctatcctgatgcacgattatgactctacccccatgtagaagcttggggatcaattctctagagctcgctgatcagcctcgactgtgccttctagttgccagccatctgttgtttgcccctcccccgtgccttccttgaccctggaaggtgccactcccactgtcctttcctaataaaatgaggaaattgcatcgcattgtctgagtaggtgtcattctattctggggggtggggtggggcaggacagcaagggggaggattgggaagacaatagcaggcatgctggggatgcggtgggctctatggcttctgaggaaattgggcgtggcttaagggtgggaaagaatatataaggtgggggtcttatgtagttttgtatctgttttgcagcagccgccgccgccatgagcaccaactcgtttgatggaagcattgtgagctcatatttgacaacgcgcatgcccccatgggccggggtgcgtcagaatgtgatgggctccagcattgatggtcgccccgtcctgcccgcaaactctactaccttgacctacgagaccgtgtctggaacgccgttggagactgcagcctccgccgccgcttcagccgctgcagccaccgcccgcgggattgtgactgactttgctttcctgagcccgcttgcaagcagtgcagcttcccgttcatccgcccgcgatgacaagttgacggctcttttggcacaattggattctttgacccgggaacttaatgtcgtttctcagcagctgttggatctgcgccagcaggtttctgccctgaaggcttcctcccctcccaatgcggtttaaaacataaataaaaaaccagactctgtttggatttggatcaagcaagtgtcttgctgtctttatttaggggttttgcgcgcgcggtaggcccgggaccagcggtctcggtcgttgagggtcctgtgtattttttccaggacgtggtaaaggtgactctggatgttcagatacatgggcataagcccgtctctggggtggaggtagcaccactgcagagcttcatgctgcggggtggtgttgtagatgatccagtcgtagcaggagcgctgggcgtggtgcctaaaaatgtctttcagtagcaagctgattgccaggggcaggcccttggtgtaagtgtttacaaagcggttaagctgggatgggtgcatacgtggggatatgagatgcatcttggactgtatttttaggttggctatgttcccagccatatccctccggggattcatgttgtgcagaaccaccagcacagtgtatccggtgcacttgggaaatttgtcatgtagcttagaaggaaatgcgtggaagaacttggagacgcccttgtgacctccaagattttccatgcattcgtccataatgatggcaatgggcccacgggcggcggcctgggcgaagatatttctgggatcactaacgtcatagttgtgttccaggatgagatcgtcataggccatttttacaaagcgcgggcggagggtgccagactgcggtataatggttccatccggcccaggggcgtagttaccctcacagatttgcatttcccacgctttgagttcagatggggggatcatgtctacctgcggggcgatgaagaaaacggtttccggggtaggggagatcagctgggaagaaagcaggttcctgagcagctgcgacttaccgcagccggtgggcccgtaaatcacacctattaccgggtgcaactggtagttaagagagctgcagctgccgtcatccctgagcaggggggccacttcgttaagcatgtccctgactcgcatgttttccctgaccaaatccgccagaaggcgctcgccgcccagcgatagcagttcttgcaaggaagcaaagtttttcaacggtttgagaccgtccgccgtaggcatgcttttgagcgtttgaccaagcagttccaggcggtcccacagctcggtcacctgctctacggcatctcgatccagcatatctcctcgtttcgcgggttggggcggctttcgctgtacggcagtagtcggtgctcgtccagacgggccagggtcatgtctttccacgggcgcagggtcctcgtcagcgtagtctgggtcacggtgaaggggtgcgctccgggctgcgcgctggccagggtgcgcttgaggctggtcctgctggtgctgaagcgctgccggtcttcgccctgcgcgtcggccaggtagcatttgaccatggtgtcatagtccagcccctccgcggcgtggcccttggcgcgcagcttgcccttggaggaggcgccgcacgaggggcagtgcagacttttgagggcgtagagcttgggcgcgagaaataccgattccggggagtaggcatccgcgccgcaggccccgcagacggtctcgcattccacgagccaggtgagctctggccgttcggggtcaaaaaccaggtttcccccatgctttttgatgcgtttcttacctctggtttccatgagccggtgtccacgctcggtgacgaaaaggctgtccgtgtccccgtatacagacttgagaggcctgtcctcgagcggtgttccgcggtcctcctcgtatagaaactcggaccactctgagacaaaggctcgcgtccaggccagcacgaaggaggctaagtgggaggggtagcggtcgttgtccactagggggtccactcgctccagggtgtgaagacacatgtcgccctcttcggcatcaaggaaggtgattggtttgtaggtgtaggccacgtgaccgggtgttcctgaaggggggctataaaagggggtgggggcgcgttcgtcctcactctcttccgcatcgctgtctgcgagggccagctgttggggtgagtactccctctgaaaagcgggcatgacttctgcgctaagattgtcagtttccaaaaacgaggaggatttgatattcacctggcccgcggtgatgcctttgagggtggccgcatccatctggtcagaaaagacaatctttttgttgtcaagcttggtggcaaacgacccgtagagggcgttggacagcaacttggcgatggagcgcagggtttggtttttgtcgcgatcggcgcgctccttggccgcgatgtttagctgcacgtattcgcgcgcaacgcaccgccattcgggaaagacggtggtgcgctcgtcgggcaccaggtgcacgcgccaaccgcggttgtgcagggtgacaaggtcaacgctggtggctacctctccgcgtaggcgctcgttggtccagcagaggcggccgcccttgcgcgagcagaatggcggtagggggtctagctgcgtctcgtccggggggtctgcgtccacggtaaagaccccgggcagcaggcgcgcgtcgaagtagtctatcttgcatccttgcaagtctagcgcctgctgccatgcgcgggcggcaagcgcgcgctcgtatgggttgagtgggggaccccatggcatggggtgggtgagcgcggaggcgtacatgccgcaaatgtcgtaaacgtagaggggctctctgagtattccaagatatgtagggtagcatcttccaccgcggatgctggcgcgcacgtaatcgtatagttcgtgcgagggagcgaggaggtcgggaccgaggttgctacgggcgggctgctctgctcggaagactatctgcctgaagatggcatgtgagttggatgatatggttggacgctggaagacgttgaagctggcgtctgtgagacctaccgcgtcacgcacgaaggaggcgtaggagtcgcgcagcttgttgaccagctcggcggtgacctgcacgtctagggcgcagtagtccagggtttccttgatgatgtcatacttatcctgtcccttttttttccacagctcgcggttgaggacaaactcttcgcggtctttccagtactcttggatcggaaacccgtcggcctccgaacggtaagagcctagcatgtagaactggttgacggcctggtaggcgcagcatcccttttctacgggtagcgcgtatgcctgcgcggccttccggagcgaggtgtgggtgagcgcaaaggtgtccctgaccatgactttgaggtactggtatttgaagtcagtgtcgtcgcatccgccctgctcccagagcaaaaagtccgtgcgctttttggaacgcggatttggcagggcgaaggtgacatcgttgaagagtatctttcccgcgcgaggcataaagttgcgtgtgatgcggaagggtcccggcacctcggaacggttgttaattacctgggcggcgagcacgatctcgtcaaagccgttgatgttgtggcccacaatgtaaagttccaagaagcgcgggatgcccttgatggaaggcaattttttaagttcctcgtaggtgagctcttcaggggagctgagcccgtgctctgaaagggcccagtctgcaagatgagggttggaagcgacgaatgagctccacaggtcacgggccattagcatttgcaggtggtcgcgaaaggtcctaaactggcgacctatggccattttttctggggtgatgcagtagaaggtaagcgggtcttgttcccagcggtcccatccaaggttcgcggctaggtctcgcgcggcagtcactagaggctcatctccgccgaacttcatgaccagcatgaagggcacgagctgcttcccaaaggcccccatccaagtataggtctctacatcgtaggtgacaaagagacgctcggtgcgaggatgcgagccgatcgggaagaactggatctcccgccaccaattggaggagtggctattgatgtggtgaaagtagaagtccctgcgacgggccgaacactcgtgctggcttttgtaaaaacgtgcgcagtactggcagcggtgcacgggctgtacatcctgcacgaggttgacctgacgaccgcgcacaaggaagcagagtgggaatttgagcccctcgcctggcgggtttggctggtggtcttctacttcggctgcttgtccttgaccgtctggctgctcgaggggagttacggtggatcggaccaccacgccgcgcgagcccaaagtccagatgtccgcgcgcggcggtcggagcttgatgacaacatcgcgcagatgggagctgtccatggtctggagctcccgcggcgtcaggtcaggcgggagctcctgcaggtttacctcgcatagacgggtcagggcgcgggctagatccaggtgatacctaatttccaggggctggttggtggcggcgtcgatggcttgcaagaggccgcatccccgcggcgcgactacggtaccgcgcggcgggcggtgggccgcgggggtgtccttggatgatgcatctaaaagcggtgacgcgggcgagcccccggaggtagggggggctccggacccgccgggagagggggcaggggcacgtcggcgccgcgcgcgggcaggagctggtgctgcgcgcgtaggttgctggcgaacgcgacgacgcggcggttgatctcctgaatctggcgcctctgcgtgaagacgacgggcccggtgagcttgaacctgaaagagagttcgacagaatcaatttcggtgtcgttgacggcggcctggcgcaaaatctcctgcacgtctcctgagttgtcttgataggcgatctcggccatgaactgctcgatctcttcctcctggagatctccgcgtccggctcgctccacggtggcggcgaggtcgttggaaatgcgggccatgagctgcgagaaggcgttgaggcctccctcgttccagacgcggctgtagaccacgcccccttcggcatcgcgggcgcgcatgaccacctgcgcgagattgagctccacgtgccgggcgaagacggcgtagtttcgcaggcgctgaaagaggtagttgagggtggtggcggtgtgttctgccacgaagaagtacataacccagcgtcgcaacgtggattcgttgatatcccccaaggcctcaaggcgctccatggcctcgtagaagtccacggcgaagttgaaaaactgggagttgcgcgccgacacggttaactcctcctccagaagacggatgagctcggcgacagtgtcgcgcacctcgcgctcaaaggctacaggggcctcttcttcttcttcaatctcctcttccataagggcctccccttcttcttcttctggcggcggtgggggaggggggacacggcggcgacgacggcgcaccgggaggcggtcgacaaagcgctcgatcatctccccgcggcgacggcgcatggtctcggtgacggcgcggccgttctcgcgggggcgcagttggaagacgccgcccgtcatgtcccggttatgggttggcggggggctgccatgcggcagggatacggcgctaacgatgcatctcaacaattgttgtgtaggtactccgccgccgagggacctgagcgagtccgcatcgaccggatcggaaaacctctcgagaaaggcgtctaaccagtcacagtcgcaaggtaggctgagcaccgtggcgggcggcagcgggcggcggtcggggttgtttctggcggaggtgctgctgatgatgtaattaaagtaggcggtcttgagacggcggatggtcgacagaagcaccatgtccttgggtccggcctgctgaatgcgcaggcggtcggccatgccccaggcttcgttttgacatcggcgcaggtctttgtagtagtcttgcatgagcctttctaccggcacttcttcttctccttcctcttgtcctgcatctcttgcatctatcgctgcggcggcggcggagtttggccgtaggtggcgccctcttcctcccatgcgtgtgaccccgaagcccctcatcggctgaagcagggctaggtcggcgacaacgcgctcggctaatatggcctgctgcacctgcgtgagggtagactggaagtcatccatgtccacaaagcggtggtatgcgcccgtgttgatggtgtaagtgcagttggccataacggaccagttaacggtctggtgacccggctgcgagagctcggtgtacctgagacgcgagtaagccctcgagtcaaatacgtagtcgttgcaagtccgcaccaggtactggtatcccaccaaaaagtgcggcggcggctggcggtagaggggccagcgtagggtggccggggctccgggggcgagatcttccaacataaggcgatgatatccgtagatgtacctggacatccaggtgatgccggcggcggtggtggaggcgcgcggaaagtcgcggacgcggttccagatgttgcgcagcggcaaaaagtgctccatggtcgggacgctctggccggtcaggcgcgcgcaatcgttgacgctctagcgtgcaaaaggagagcctgtaagcgggcactcttccgtggtctggtggataaattcgcaagggtatcatggcggacgaccggggttcgagccccgtatccggccgtccgccgtgatccatgcggttaccgcccgcgtgtcgaacccaggtgtgcgacgtcagacaacgggggagtgctccttttggcttccttccaggcgcggcggctgctgcgctagcttttttggccactggccgcgcgcagcgtaagcggttaggctggaaagcgaaagcattaagtggctcgctccctgtagccggagggttattttccaagggttgagtcgcgggacccccggttcgagtctcggaccggccggactgcggcgaacgggggtttgcctccccgtcatgcaagaccccgcttgcaaattcctccggaaacagggacgagccccttttttgcttttcccagatgcatccggtgctgcggcagatgcgcccccctcctcagcagcggcaagagcaagagcagcggcagacatgcagggcaccctcccctcctcctaccgcgtcaggaggggcgacatccgcggttgacgcggcagcagatggtgattacgaacccccgcggcgccgggcccggcactacctggacttggaggagggcgagggcctggcgcggctaggagcgccctctcctgagcggcacccaagggtgcagctgaagcgtgatacgcgtgaggcgtacgtgccgcggcagaacctgtttcgcgaccgcgagggagaggagcccgaggagatgcgggatcgaaagttccacgcagggcgcgagctgcggcatggcctgaatcgcgagcggttgctgcgcgaggaggactttgagcccgacgcgcgaaccgggattagtcccgcgcgcgcacacgtggcggccgccgacctggtaaccgcatacgagcagacggtgaaccaggagattaactttcaaaaaagctttaacaaccacgtgcgtacgcttgtggcgcgcgaggaggtggctataggactgatgcatctgtgggactttgtaagcgcgctggagcaaaacccaaatagcaagccgctcatggcgcagctgttccttatagtgcagcacagcagggacaacgaggcattcagggatgcgctgctaaacatagtagagcccgagggccgctggctgctcgatttgataaacatcctgcagagcatagtggtgcaggagcgcagcttgagcctggctgacaaggtggccgccatcaactattccatgcttagcctgggcaagttttacgcccgcaagatataccataccccttacgttcccatagacaaggaggtaaagatcgaggggttctacatgcgcatggcgctgaaggtgcttaccttgagcgacgacctgggcgtttatcgcaacgagcgcatccacaaggccgtgagcgtgagccggcggcgcgagctcagcgaccgcgagctgatgcacagcctgcaaagggccctggctggcacgggcagcggcgatagagaggccgagtcctactttgacgcgggcgctgacctgcgctgggccccaagccgacgcgccctggaggcagctggggccggacctgggctggcggtggcacccgcgcgcgctggcaacgtcggcggcgtggaggaatatgacgaggacgatgagtacgagccagaggacggcgagtactaagcggtgatgtttctgatcagatgatgcaagacgcaacggacccggcggtgcgggcggcgctgcagagccagccgtccggccttaactccacggacgactggcgccaggtcatggaccgcatcatgtcgctgactgcgcgcaatcctgacgcgttccggcagcagccgcaggccaaccggctctccgcaattctggaagcggtggtcccggcgcgcgcaaaccccacgcacgagaaggtgctggcgatcgtaaacgcgctggccgaaaacagggccatccggcccgacgaggccggcctggtctacgacgcgctgcttcagcgcgtggctcgttacaacagcggcaacgtgcagaccaacctggaccggctggtgggggatgtgcgcgaggccgtggcgcagcgtgagcgcgcgcagcagcagggcaacctgggctccatggttgcactaaacgccttcctgagtacacagcccgccaacgtgccgcggggacaggaggactacaccaactttgtgagcgcactgcggctaatggtgactgagacaccgcaaagtgaggtgtaccagtctgggccagactattttttccagaccagtagacaaggcctgcagaccgtaaacctgagccaggctttcaaaaacttgcaggggctgtggggggtgcgggctcccacaggcgaccgcgcgaccgtgtctagcttgctgacgcccaactcgcgcctgttgctgctgctaatagcgcccttcacggacagtggcagcgtgtcccgggacacatacctaggtcacttgctgacactgtaccgcgaggccataggtcaggcgcatgtggacgagcatactttccaggagattacaagtgtcagccgcgcgctggggcaggaggacacgggcagcctggaggcaaccctaaactacctgctgaccaaccggcggcagaagatcccctcgttgcacagtttaaacagcgaggaggagcgcattttgcgctacgtgcagcagagcgtgagccttaacctgatgcgcgacggggtaacgcccagcgtggcgctggacatgaccgcgcgcaacatggaaccgggcatgtatgcctcaaaccggccgtttatcaaccgcctaatggactacttgcatcgcgcggccgccgtgaaccccgagtatttcaccaatgccatcttgaacccgcactggctaccgccccctggtttctacaccgggggattcgaggtgcccgagggtaacgatggattcctctgggacgacatagacgacagcgtgttttccccgcaaccgcagaccctgctagagttgcaacagcgcgagcaggcagaggcggcgctgcgaaaggaaagcttccgcaggccaagcagcttgtccgatctaggcgctgcggccccgcggtcagatgctagtagcccatttccaagcttgatagggtctcttaccagcactcgcaccacccgcccgcgcctgctgggcgaggaggagtacctaaacaactcgctgctgcagccgcagcgcgaaaaaaacctgcctccggcatttcccaacaacgggatagagagcctagtggacaagatgagtagatggaagacgtacgcgcaggagcacagggacgtgccaggcccgcgcccgcccacccgtcgtcaaaggcacgaccgtcagcggggtctggtgtgggaggacgatgactcggcagacgacagcagcgtcctggatttgggagggagtggcaacccgtttgcgcaccttcgccccaggctggggagaatgttttaaaaaaaaaaaagcatgatgcaaaataaaaaactcaccaaggccatggcaccgagcgttggttttcttgtattccccttagtatgcggcgcgcggcgatgtatgaggaaggtcctcctccctcctacgagagtgtggtgagcgcggcgccagtggcggcggcgctgggttctcccttcgatgctcccctggacccgccgtttgtgcctccgcggtacctgcggcctaccggggggagaaacagcatccgttactctgagttggcacccctattcgacaccacccgtgtgtacctggtggacaacaagtcaacggatgtggcatccctgaactaccagaacgaccacagcaactttctgaccacggtcattcaaaacaatgactacagcccgggggaggcaagcacacagaccatcaatcttgacgaccggtcgcactggggcggcgacctgaaaaccatcctgcataccaacatgccaaatgtgaacgagttcatgtttaccaataagtttaaggcgcgggtgatggtgtcgcgcttgcctactaaggacaatcaggtggagctgaaatacgagtgggtggagttcacgctgcccgagggcaactactccgagaccatgaccatagaccttatgaacaacgcgatcgtggagcactacttgaaagtgggcagacagaacggggttctggaaagcgacatcggggtaaagtttgacacccgcaacttcagactggggtttgaccccgtcactggtcttgtcatgcctggggtatatacaaacgaagccttccatccagacatcattttgctgccaggatgcggggtggacttcacccacagccgcctgagcaacttgttgggcatccgcaagcggcaacccttccaggagggctttaggatcacctacgatgatctggagggtggtaacattcccgcactgttggatgtggacgcctaccaggcgagcttgaaagatgacaccgaacagggcgggggtggcgcaggcggcagcaacagcagtggcagcggcgcggaagagaactccaacgcggcagccgcggcaatgcagccggtggaggacatgaacgatcatgccattcgcggcgacacctttgccacacgggctgaggagaagcgcgctgaggccgaagcagcggccgaagctgccgcccccgctgcgcaacccgaggtcgagaagcctcagaagaaaccggtgatcaaacccctgacagaggacagcaagaaacgcagttacaacctaataagcaatgacagcaccttcacccagtaccgcagctggtaccttgcatacaactacggcgaccctcagaccggaatccgctcatggaccctgctttgcactcctgacgtaacctgcggctcggagcaggtctactggtcgttgccagacatgatgcaagaccccgtgaccttccgctccacgcgccagatcagcaactttccggtggtgggcgccgagctgttgcccgtgcactccaagagcttctacaacgaccaggccgtctactcccaactcatccgccagtttacctctctgacccacgtgttcaatcgctttcccgagaaccagattttggcgcgcccgccagcccccaccatcaccaccgtcagtgaaaacgttcctgctctcacagatcacgggacgctaccgctgcgcaacagcatcggaggagtccagcgagtgaccattactgacgccagacgccgcacctgcccctacgtttacaaggccctgggcatagtctcgccgcgcgtcctatcgagccgcactttttgagcaagcatgtccatccttatatcgcccagcaataacacaggctggggcctgcgcttcccaagcaagatgtttggcggggccaagaagcgctccgaccaacacccagtgcgcgtgcgcgggcactaccgcgcgccctggggcgcgcacaaacgcggccgcactgggcgcaccaccgtcgatgacgccatcgacgcggtggtggaggaggcgcgcaactacacgcccacgccgccaccagtgtccacagtggacgcggccattcagaccgtggtgcgcggagcccggcgctatgctaaaatgaagagacggcggaggcgcgtagcacgtcgccaccgccgccgacccggcactgccgcccaacgcgcggcggcggccctgcttaaccgcgcacgtcgcaccggccgacgggcggccatgcgggccgctcgaaggctggccgcgggtattgtcactgtgccccccaggtccaggcgacgagcggccgccgcagcagccgcggccattagtgctatgactcagggtcgcaggggcaacgtgtattgggtgcgcgactcggttagcggcctgcgcgtgcccgtgcgcacccgccccccgcgcaactagattgcaagaaaaaactacttagactcgtactgttgtatgtatccagcggcggcggcgcgcaacgaagctatgtccaagcgcaaaatcaaagaagagatgctccaggtcatcgcgccggagatctatggccccccgaagaaggaagagcaggattacaagccccgaaagctaaagcgggtcaaaaagaaaaagaaagatgatgatgatgaacttgacgacgaggtggaactgctgcacgctaccgcgcccaggcgacgggtacagtggaaaggtcgacgcgtaaaacgtgttttgcgacccggcaccaccgtagtctttacgcccggtgagcgctccacccgcacctacaagcgcgtgtatgatgaggtgtacggcgacgaggacctgcttgagcaggccaacgagcgcctcggggagtttgcctacggaaagcggcataaggacatgctggcgttgccgctggacgagggcaacccaacacctagcctaaagcccgtaacactgcagcaggtgctgcccgcgcttgcaccgtccgaagaaaagcgcggcctaaagcgcgagtctggtgacttggcacccaccgtgcagctgatggtacccaagcgccagcgactggaagatgtcttggaaaaaatgaccgtggaacctgggctggagcccgaggtccgcgtgcggccaatcaagcaggtggcgccgggactgggcgtgcagaccgtggacgttcagatacccactaccagtagcaccagtattgccaccgccacagagggcatggagacacaaacgtccccggttgcctcagcggtggcggatgccgcggtgcaggcggtcgctgcggccgcgtccaagacctctacggaggtgcaaacggacccgtggatgtttcgcgtttcagccccccggcgcccgcgccgttcgaggaagtacggcgccgccagcgcgctactgcccgaatatgccctacatccttccattgcgcctacccccggctatcgtggctacacctaccgccccagaagacgagcaactacccgacgccgaaccaccactggaacccgccgccgccgtcgccgtcgccagcccgtgctggccccgatttccgtgcgcagggtggctcgcgaaggaggcaggaccctggtgctgccaacagcgcgctaccaccccagcatcgtttaaaagccggtctttgtggttcttgcagatatggccctcacctgccgcctccgtttcccggtgccgggattccgaggaagaatgcaccgtaggaggggcatggccggccacggcctgacgggcggcatgcgtcgtgcgcaccaccggcggcggcgcgcgtcgcaccgtcgcatgcgcggcggtatcctgcccctccttattccactgatcgccgcggcgattggcgccgtgcccggaattgcatccgtggccttgcaggcgcagagacactgattaaaaacaagttgcatgtggaaaaatcaaaataaaaagtctggactctcacgctcgcttggtcctgtaactattttgtagaatggaagacatcaactttgcgtctctggccccgcgacacggctcgcgcccgttcatgggaaactggcaagatatcggcaccagcaatatgagcggtggcgccttcagctggggctcgctgtggagcggcattaaaaatttcggttccaccgttaagaactatggcagcaaggcctggaacagcagcacaggccagatgctgagggataagttgaaagagcaaaatttccaacaaaaggtggtagatggcctggcctctggcattagcggggtggtggacctggccaaccaggcagtgcaaaataagattaacagtaagcttgatccccgccctcccgtagaggagcctccaccggccgtggagacagtgtctccagaggggcgtggcgaaaagcgtccgcgccccgacagggaagaaactctggtgacgcaaatagacgagcctccctcgtacgaggaggcactaaagcaaggcctgcccaccacccgtcccatcgcgcccatggctaccggagtgctgggccagcacacacccgtaacgctggacctgcctccccccgccgacacccagcagaaacctgtgctgccaggcccgaccgccgttgttgtaacccgtcctagccgcgcgtccctgcgccgcgccgccagcggtccgcgatcgttgcggcccgtagccagtggcaactggcaaagcacactgaacagcatcgtgggtctgggggtgcaatccctgaagcgccgacgatgcttctgatagctaacgtgtcgtatgtgtgtcatgtatgcgtccatgtcgccgccagaggagctgctgagccgccgcgcgcccgctttccaagatggctaccccttcgatgatgccgcagtggtcttacatgcacatctcgggccaggacgcctcggagtacctgagccccgggctggtgcagtttgcccgcgccaccgagacgtacttcagcctgaataacaagtttagaaaccccacggtggcgcctacgcacgacgtgaccacagaccggtcccagcgtttgacgctgcggttcatccctgtggaccgtgaggatactgcgtactcgtacaaggcgcggttcaccctagctgtgggtgataaccgtgtgctggacatggcttccacgtactttgacatccgcggcgtgctggacaggggccctacttttaagccctactctggcactgcctacaacgccctggctcccaagggtgccccaaatccttgcgaatgggatgaagctgctactgctcttgaaataaacctagaagaagaggacgatgacaacgaagacgaagtagacgagcaagctgagcagcaaaaaactcacgtatttgggcaggcgccttattctggtataaatattacaaaggagggtattcaaataggtgtcgaaggtcaaacacctaaatatgccgataaaacatttcaacctgaacctcaaataggagaatctcagtggtacgaaacagaaattaatcatgcagctgggagagtcctaaaaaagactaccccaatgaaaccatgttacggttcatatgcaaaacccacaaatgaaaatggagggcaaggcattcttgtaaagcaacaaaatggaaagctagaaagtcaagtggaaatgcaatttttctcaactactgaggcagccgcaggcaatggtgataacttgactcctaaagtggtattgtacagtgaagatgtagatatagaaaccccagacactcatatttcttacatgcccactattaaggaaggtaactcacgagaactaatgggccaacaatctatgcccaacaggcctaattacattgcttttagggacaattttattggtctaatgtattacaacagcacgggtaatatgggtgttctggcgggccaagcatcgcagttgaatgctgttgtagatttgcaagacagaaacacagagctttcataccagcttttgcttgattccattggtgatagaaccaggtacttttctatgtggaatcaggctgttgacagctatgatccagatgttagaattattgaaaatcatggaactgaagatgaacttccaaattactgctttccactgggaggtgtgattaatacagagactcttaccaaggtaaaacctaaaacaggtcaggaaaatggatgggaaaaagatgctacagaattttcagataaaaatgaaataagagttggaaataattttgccatggaaatcaatctaaatgccaacctgtggagaaatttcctgtactccaacatagcgctgtatttgcccgacaagctaaagtacagtccttccaacgtaaaaatttctgataacccaaacacctacgactacatgaacaagcgagtggtggctcccgggctagtggactgctacattaaccttggagcacgctggtcccttgactatatggacaacgtcaacccatttaaccaccaccgcaatgctggcctgcgctaccgctcaatgttgctgggcaatggtcgctatgtgcccttccacatccaggtgcctcagaagttctttgccattaaaaacctccttctcctgccgggctcatacacctacgagtggaacttcaggaaggatgttaacatggttctgcagagctccctaggaaatgacctaagggttgacggagccagcattaagtttgatagcatttgcctttacgccaccttcttccccatggcccacaacaccgcctccacgcttgaggccatgcttagaaacgacaccaacgaccagtcctttaacgactatctctccgccgccaacatgctctaccctatacccgccaacgctaccaacgtgcccatatccatcccctcccgcaactgggcggctttccgcggctgggccttcacgcgccttaagactaaggaaaccccatcactgggctcgggctacgacccttattacacctactctggctctataccctacctagatggaaccttttacctcaaccacacctttaagaaggtggccattacctttgactcttctgtcagctggcctggcaatgaccgcctgcttacccccaacgagtttgaaattaagcgctcagttgacggggagggttacaacgttgcccagtgtaacatgaccaaagactggttcctggtacaaatgctagctaactataacattggctaccagggcttctatatcccagagagctacaaggaccgcatgtactccttctttagaaacttccagcccatgagccgtcaggtggtggatgatactaaatacaaggactaccaacaggtgggcatcctacaccaacacaacaactctggatttgttggctaccttgcccccaccatgcgcgaaggacaggcctaccctgctaacttcccctatccgcttataggcaagaccgcagttgacagcattacccagaaaaagtttctttgcgatcgcaccctttggcgcatcccattctccagtaactttatgtccatgggcgcactcacagacctgggccaaaaccttctctacgccaactccgcccacgcgctagacatgacttttgaggtggatcccatggacgagcccacccttctttatgttttgtttgaagtctttgacgtggtccgtgtgcaccagccgcaccgcggcgtcatcgaaaccgtgtacctgcgcacgcccttctcggccggcaacgccacaacataaagaagcaagcaacatcaacaacagctgccgccatgggctccagtgagcaggaactgaaagccattgtcaaagatcttggttgtgggccatattttttgggcacctatgacaagcgctttccaggctttgtttctccacacaagctcgcctgcgccatagtcaatacggccggtcgcgagactgggggcgtacactggatggcctttgcctggaacccgcactcaaaaacatgctacctctttgagccctttggcttttctgaccagcgactcaagcaggtttaccagtttgagtacgagtcactcctgcgccgtagcgccattgcttcttcccccgaccgctgtataacgctggaaaagtccacccaaagcgtacaggggcccaactcggccgcctgtggactattctgctgcatgtttctccacgcctttgccaactggccccaaactcccatggatcacaaccccaccatgaaccttattaccggggtacccaactccatgctcaacagtccccaggtacagcccaccctgcgtcgcaaccaggaacagctctacagcttcctggagcgccactcgccctacttccgcagccacagtgcgcagattaggagcgccacttctttttgtcacttgaaaaacatgtaaaaataatgtactagagacactttcaataaaggcaaatgcttttatttgtacactctcgggtgattatttacccccacccttgccgtctgcgccgtttaaaaatcaaaggggttctgccgcgcatcgctatgcgccactggcagggacacgttgcgatactggtgtttagtgctccacttaaactcaggcacaaccatccgcggcagctcggtgaagttttcactccacaggctgcgcaccatcaccaacgcgtttagcaggtcgggcgccgatatcttgaagtcgcagttggggcctccgccctgcgcgcgcgagttgcgatacacagggttgcagcactggaacactatcagcgccgggtggtgcacgctggccagcacgctcttgtcggagatcagatccgcgtccaggtcctccgcgttgctcagggcgaacggagtcaactttggtagctgccttcccaaaaagggcgcgtgcccaggctttgagttgcactcgcaccgtagtggcatcaaaaggtgaccgtgcccggtctgggcgttaggatacagcgcctgcataaaagccttgatctgcttaaaagccacctgagcctttgcgccttcagagaagaacatgccgcaagacttgccggaaaactgattggccggacaggccgcgtcgtgcacgcagcaccttgcgtcggtgttggagatctgcaccacatttcggccccaccggttcttcacgatcttggccttgctagactgctccttcagcgcgcgctgcccgttttcgctcgtcacatccatttcaatcacgtgctccttatttatcataatgcttccgtgtagacacttaagctcgccttcgatctcagcgcagcggtgcagccacaacgcgcagcccgtgggctcgtgatgcttgtaggtcacctctgcaaacgactgcaggtacgcctgcaggaatcgccccatcatcgtcacaaaggtcttgttgctggtgaaggtcagctgcaacccgcggtgctcctcgttcagccaggtcttgcatacggccgccagagcttccacttggtcaggcagtagtttgaagttcgcctttagatcgttatccacgtggtacttgtccatcagcgcgcgcgcagcctccatgcccttctcccacgcagacacgatcggcacactcagcgggttcatcaccgtaatttcactttccgcttcgctgggctcttcctcttcctcttgcgtccgcataccacgcgccactgggtcgtcttcattcagccgccgcactgtgcgcttacctcctttgccatgcttgattagcaccggtgggttgctgaaacccaccatttgtagcgccacatcttctctttcttcctcgctgtccacgattacctctggtgatggcgggcgctcgggcttgggagaagggcgcttctttttcttcttgggcgcaatggccaaatccgccgccgaggtcgatggccgcgggctgggtgtgcgcggcaccagcgcgtcttgtgatgagtcttcctcgtcctcggactcgatacgccgcctcatccgcttttttgggggcgcccggggaggcggcggcgacggggacggggacgacacgtcctccatggttgggggacgtcgcgccgcaccgcgtccgcgctcgggggtggtttcgcgctgctcctcttcccgactggccatttccttctcctataggcagaaaaagatcatggagtcagtcgagaagaaggacagcctaaccgccccctctgagttcgccaccaccgcctccaccgatgccgccaacgcgcctaccaccttccccgtcgaggcacccccgcttgaggaggaggaagtgattatcgagcaggacccaggttttgtaagcgaagacgacgaggaccgctcagtaccaacagaggataaaaagcaagaccaggacaacgcagaggcaaacgaggaacaagtcgggcggggggacgaaaggcatggcgactacctagatgtgggagacgacgtgctgttgaagcatctgcagcgccagtgcgccattatctgcgacgcgttgcaagagcgcagcgatgtgcccctcgccatagcggatgtcagccttgcctacgaacgccacctattctcaccgcgcgtaccccccaaacgccaagaaaacggcacatgcgagcccaacccgcgcctcaacttctaccccgtatttgccgtgccagaggtgcttgccacctatcacatctttttccaaaactgcaagatacccctatcctgccgtgccaaccgcagccgagcggacaagcagctggccttgcggcagggcgctgtcatacctgatatcgcctcgctcaacgaagtgccaaaaatctttgagggtcttggacgcgacgagaagcgcgcggcaaacgctctgcaacaggaaaacagcgaaaatgaaagtcactctggagtgttggtggaactcgagggtgacaacgcgcgcctagccgtactaaaacgcagcatcgaggtcacccactttgcctacccggcacttaacctaccccccaaggtcatgagcacagtcatgagtgagctgatcgtgcgccgtgcgcagcccctggagagggatgcaaatttgcaagaacaaacagaggagggcctacccgcagttggcgacgagcagctagcgcgctggcttcaaacgcgcgagcctgccgacttggaggagcgacgcaaactaatgatggccgcagtgctcgttaccgtggagcttgagtgcatgcagcggttctttgctgacccggagatgcagcgcaagctagaggaaacattgcactacacctttcgacagggctacgtacgccaggcctgcaagatctccaacgtggagctctgcaacctggtctcctaccttggaattttgcacgaaaaccgccttgggcaaaacgtgcttcattccacgctcaagggcgaggcgcgccgcgactacgtccgcgactgcgtttacttatttctatgctacacctggcagacggccatgggcgtttggcagcagtgcttggaggagtgcaacctcaaggagctgcagaaactgctaaagcaaaacttgaaggacctatggacggccttcaacgagcgctccgtggccgcgcacctggcggacatcattttccccgaacgcctgcttaaaaccctgcaacagggtctgccagacttcaccagtcaaagcatgttgcagaactttaggaactttatcctagagcgctcaggaatcttgcccgccacctgctgtgcacttcctagcgactttgtgcccattaagtaccgcgaatgccctccgccgctttggggccactgctaccttctgcagctagccaactaccttgcctaccactctgacataatggaagacgtgagcggtgacggtctactggagtgtcactgtcgctgcaacctatgcaccccgcaccgctccctggtttgcaattcgcagctgcttaacgaaagtcaaattatcggtacctttgagctgcagggtccctcgcctgacgaaaagtccgcggctccggggttgaaactcactccggggctgtggacgtcggcttaccttcgcaaatttgtacctgaggactaccacgcccacgagattaggttctacgaagaccaatcccgcccgcctaatgcggagcttaccgcctgcgtcattacccagggccacattcttggccaattgcaagccatcaacaaagcccgccaagagtttctgctacgaaagggacggggggtttacttggacccccagtccggcgaggagctcaacccaatccccccgccgccgcagccctatcagcagcagccgcgggcccttgcttcccaggatggcacccaaaaagaagctgcagctgccgccgccacccacggacgaggaggaatactgggacagtcaggcagaggaggttttggacgaggaggaggaggacatgatggaagactgggagagcctagacgaggaagcttccgaggtcgaagaggtgtcagacgaaacaccgtcaccctcggtcgcattcccctcgccggcgccccagaaatcggcaaccggttccagcatggctacaacctccgctcctcaggcgccgccggcactgcccgttcgccgacccaaccgtagatgggacaccactggaaccagggccggtaagtccaagcagccgccgccgttagcccaagagcaacaacagcgccaaggctaccgctcatggcgcgggcacaagaacgccatagttgcttgcttgcaagactgtgggggcaacatctccttcgcccgccgctttcttctctaccatcacggcgtggccttcccccgtaacatcctgcattactaccgtcatctctacagcccatactgcaccggcggcagcggcagcaacagcagcggccacacagaagcaaaggcgaccggatagcaagactctgacaaagcccaagaaatccacagcggcggcagcagcaggaggaggagcgctgcgtctggcgcccaacgaacccgtatcgacccgcgagcttagaaacaggatttttcccactctgtatgctatatttcaacagagcaggggccaagaacaagagctgaaaataaaaaacaggtctctgcgatccctcacccgcagctgcctgtatcacaaaagcgaagatcagcttcggcgcacgctggaagacgcggaggctctcttcagtaaatactgcgcgctgactcttaaggactagtttcgcgccctttctcaaatttaagcgcgaaaactacgtcatctccagcggccacacccggcgccagcacctgttgtcagcgccattatgagcaaggaaattcccacgccctacatgtggagttaccagccacaaatgggacttgcggctggagctgcccaagactactcaacccgaataaactacatgagcgcgggaccccacatgatatcccgggtcaacggaatacgcgcccaccgaaaccgaattctcctggaacaggcggctattaccaccacacctcgtaataaccttaatccccgtagttggcccgctgccctggtgtaccaggaaagtcccgctcccaccactgtggtacttcccagagacgcccaggccgaagttcagatgactaactcaggggcgcagcttgcgggcggctttcgtcacagggtgcggtcgcccgggcagggtataactcacctgacaatcagagggcgaggtattcagctcaacgacgagtcggtgagctcctcgcttggtctccgtccggacgggacatttcagatcggcggcgccggccgctcttcattcacgcctcgtcaggcaatcctaactctgcagacctcgtcctctgagccgcgctctggaggcattggaactctgcaatttattgaggagtttgtgccatcggtctactttaaccccttctcgggacctcccggccactatccggatcaatttattcctaactttgacgcggtaaaggactcggcggacggctacgactgaatgttaagtggagaggcagagcaactgcgcctgaaacacctggtccactgtcgccgccacaagtgctttgcccgcgactccggtgagttttgctactttgaattgcccgaggatcatatcgagggcccggcgcacggcgtccggcttaccgcccagggagagcttgcccgtagcctgattcgggagtttacccagcgccccctgctagttgagcgggacaggggaccctgtgttctcactgtgatttgcaactgtcctaaccctggattacatcaagatcctctagttaatgtcaggtcgcctaagtcgattaactagagtacccggggatcttattccctttaactaataaaaaaaaataataaagcatcacttacttaaaatcagttagcaaatttctgtccagtttattcagcagcacctccttgccctcctcccagctctggtattgcagcttcctcctggctgcaaactttctccacaatctaaatggaatgtcagtttcctcctgttcctgtccatccgcacccactatcttcatgttgttgcagatgaagcgcgcaagaccgtctgaagataccttcaaccccgtgtatccatatgacacggaaaccggtcctccaactgtgccttttcttactcctccctttgtatcccccaatgggtttcaagagagtccccctggggtactctctttgcgcctatccgaacctctagttacctccaatggcatgcttgcgctcaaaatgggcaacggcctctctctggacgaggccggcaaccttacctcccaaaatgtaaccactgtgagcccacctctcaaaaaaaccaagtcaaacataaacctggaaatatctgcacccctcacagttacctcagaagccctaactgtggctgccgccgcacctctaatggtcgcgggcaacacactcaccatgcaatcacaggccccgctaaccgtgcacgactccaaacttagcattgccacccaaggacccctcacagtgtcagaaggaaagctagccctgcaaacatcaggccccctcaccaccaccgatagcagtacccttactatcactgcctcaccccctctaactactgccactggtagcttgggcattgacttgaaagagcccatttatacacaaaatggaaaactaggactaaagtacggggctcctttgcatgtaacagacgacctaaacactttgaccgtagcaactggtccaggtgtgactattaataatacttccttgcaaactaaagttactggagccttgggttttgattcacaaggcaatatgcaacttaatgtagcaggaggactaaggattgattctcaaaacagacgccttatacttgatgttagttatccgtttgatgctcaaaaccaactaaatctaagactaggacagggccctctttttataaactcagcccacaacttggatattaactacaacaaaggcctttacttgtttacagcttcaaacaattccaaaaagcttgaggttaacctaagcactgccaaggggttgatgtttgacgctacagccatagccattaatgcaggagatgggcttgaatttggttcacctaatgcaccaaacacaaatcccctcaaaacaaaaattggccatggcctagaatttgattcaaacaaggctatggttcctaaactaggaactggccttagttttgacagcacaggtgccattacagtaggaaacaaaaataatgataagctaactttgtggaccggaataaaccctccacctaactgtcaaattgtggaaaacactaatacaaatgatggcaaacttactttagtattagtaaaaaatggagggcttgttaatggctacgtgtctctagttggtgtatcagacactgtgaaccaaatgttcacacaaaagacagcaaacatccaattaagattatattttgactcttctggaaatctattaactgaggaatcagacttaaaaattccacttaaaaataaatcttctacagcgaccagtgaaactgtagccagcagcaaagcctttatgccaagtactacagcttatcccttcaacaccactactagggatagtgaaaactacattcatggaatatgttactacatgactagttatgatagaagtctatttcccttgaacatttctataatgctaaacagccgtatgatttcttccaatgttgcctatgccatacaatttgaatggaatctaaatgcaagtgaatctccagaaagcaacatagctacgctgaccacatccccctttttcttttcttacattacagaagacgacaactaaagaatcgtttgtgttatgtttcaacgtgtttatttttcaattgcagaaaatttcaagtcatttttcattcagtagtatagccccaccaccacatagcttatacagatcaccgtaccttaatcaaactcacagaaccctagtattcaacctgccacctccctcccaacacacagagtacacagtcctttctccccggctggccttaaaaagcatcatatcatgggtaacagacatattcttaggtgttatattccacacggtttcctgtcgagccaaacgctcatcagtgatattaataaactccccgggcagctcacttaagttcatgtcgctgtccagctgctgagccacaggctgctgtccaacttgcggttgcttaacgggcggcgaaggagaagtccacgcctacatgggggtagagtcataatcgtgcatcaggatagggcggtggtgctgcagcagcgcgcgaataaactgctgccgccgccgctccgtcctgcaggaatacaacatggcagtggtctcctcagcgatgattcgcaccgcccgcagcataaggcgccttgtcctccgggcacagcagcgcaccctgatctcacttaaatcagcacagtaactgcagcacagcaccacaatattgttcaaaatcccacagtgcaaggcgctgtatccaaagctcatggcggggaccacagaacccacgtggccatcataccacaagcgcaggtagattaagtggcgacccctcataaacacgctggacataaacattacctcttttggcatgttgtaattcaccacctcccctctgattaaacatggcgccatccaccaccatcctaaaccagctggccaaaacctgcccgccggctatacactgcagggaaccgggactggaacaatgacagtggagagcccaggactcgtaaccatggatcatcatgctcgtcatgatatcaatgttggcacaacacaggcacacgtgcatacacttcctcaggattacaagctcctcccgcgttagaaccatatcccagggaacaacccattcctgaatcagcgtaaatcccacactgcagggaagacctcgcacgtaactcacgttgtgcattgtcaaagtgttacattcgggcagcagcggatgatcctccagtatggtagcgcgggtttctgtctcaaaaggaggtagacgatccctactgtacggagtgcgccgagacaaccgagatcgtgttggtcgtagtgtcatgccaaatggaacgccggacgtagtcatatttcctgaagcaaaaccaggtgcgggcgtgacaaacagatctgcgtctccggtctcgccgcttagatcgctctgtgtagtagttgtagtatatccactctctcaaagcatccaggcgccccctggcttcgggttctatgtaaactccttcatgcgccgctgccctgataacatccaccaccgcagaataagccacacccagccaacctacacattcgttctgcgagtcacacacgggaggagcgggaagagctggaagaaccatgtttttttttttattccaaaagattatccaaaacctcaaaatgaagatctattaagtgaacgcgctcccctccggtggcgtggtcaaactctacagccaaagaacagataatggcatttgtaagatgttgcacaatggcttccaaaaggcaaacggccctcacgtccaagtggacgtaaaggctaaacccttcagggtgaatctcctctataaacattccagcaccttcaaccatgcccaaataattctcatctcgccaccttctcaatatatctctaagcaaatcccgaatattaagtccggccattgtaaaaatctgctccagagcgccctccaccttcagcctcaagcagcgaatcatgattgcaaaaattcaggttcctcacagacctgtataagattcaaaagcggaacattaacaaaaataccgcgatcccgtaggtcccttcgcagggccagctgaacataatcgtgcaggtctgcacggaccagcgcggccacttccccgccaggaaccatgacaaaagaacccacactgattatgacacgcatactcggagctatgctaaccagcgtagccccgatgtaagcttgttgcatgggcggcgatataaaatgcaaggtgctgctcaaaaaatcaggcaaagcctcgcgcaaaaaagaaagcacatcgtagtcatgctcatgcagataaaggcaggtaagctccggaaccaccacagaaaaagacaccatttttctctcaaacatgtctgcgggtttctgcataaacacaaaataaaataacaaaaaaacatttaaacattagaagcctgtcttacaacaggaaaaacaacccttataagcataagacggactacggccatgccggcgtgaccgtaaaaaaactggtcaccgtgattaaaaagcaccaccgacagctcctcggtcatgtccggagtcataatgtaagactcggtaaacacatcaggttgattcacatcggtcagtgctaaaaagcgaccgaaatagcccgggggaatacatacccgcaggcgtagagacaacattacagcccccataggaggtataacaaaattaataggagagaaaaacacataaacacctgaaaaaccctcctgcctaggcaaaatagcaccctcccgctccagaacaacatacagcgcttccacagcggcagccataacagtcagccttaccagtaaaaaagaaaacctattaaaaaaacaccactcgacacggcaccagctcaatcagtcacagtgtaaaaaagggccaagtgcagagcgagtatatataggactaaaaaatgacgtaacggttaaagtccacaaaaaacacccagaaaaccgcacgcgaacctacgcccagaaacgaaagccaaaaaacccacaacttcctcaaatcgtcacttccgttttcccacgttacgtcacttcccattttaagaaaactacaattcccaacacatacaagttactccgccctaaaacctacgtcacccgccccgttcccacgccccgcgccacgtcacaaactccaccccctcattatcatattggcttcaatccaaaataaggtatattattgatgatg

SEQ ID NO: 7 - DNA, 37105 bp, Artificial Sequence
  Adk35R2-Spike/E4orf6-E4dl355(E4re#2)
ttaattaacatcatcaataatataccttattttggattgaagccaatatgataatgagggggtggagtttgtgacgtggcgcggggcgtgggaacggggcgggtgacgtagtagtgtggcggaagtgtgatgttgcaagtgtggcggaacacatgtaagcgacggatgtggcaaaagtgacgtttttggtgtgcgccggtgtacacaggaagtgacaattttcgcgcggttttaggcggatgttgtagtaaatttgggcgtaaccgagtaagatttggccattttcgcgggaaaactgaataagaggaagtgaaatctgaataattttgtgttactcatagcgcgtaataatttcctcagaagccatagagcccaccgcatccccagcatgcctgctattgtcttcccaatcctcccccttgctgtcctgccccaccccaccccccagaatagaatgacacctactcagacaatgcgatgcaatttcctcattttattaggaaaggacagtgggagtggcaccttccagggtcaaggaaggcacgggggaggggcaaacaacagatggctggcaactagaaggcacagtcgaggctgatcagcgagctctagagaattgatccccaagcttctacatgggggtagagtcataatcgtgcatcaggatagggcggtggtgctgcagcagcgcgcgaataaactgctgccgccgccgctccgtcctgcaggaatacaacatggcagtggtctcctcagcgatgattcgcaccgcccgcagcataaggcgccttgtcctccgggcacagcagcgcaccctgatctcacttaaatcagcacagtaactgcagcacagcaccacaatattgttcaaaatcccacagtgcaaggcgctgtatccaaagctcatggcggggaccacagaacccacgtggccatcataccacaagcgcaggtagattaagtggcgacccctcataaacacgctggacataaacattacctcttttggcatgttgtaattcaccacctcccggtaccatataaacctctgattaaacatggcgccatccaccaccatcctaaaccagctggccaaaacctgcccgccggctatacactgcagggaaccgggactggaacaatgacagtggagagcccaggactcgtaaccatggatcatcatgctcgtcatgatatcaatgttggcacaacacaggcacacgtgcatacacttcctcaggattacaagctcctcccgcgttagaaccatatcccagggaacaacccattcctgaatcagcgtaaatcccacactgcagggaagacctcgcacgtaactcacgttgtgcattgtcaaagtgttacattcgggcagcagcggatgatcctccagtatggtagcgcgggtttctgtctcaaaaggaggtagacgatccctactgtacggagtgcgccgagacaaccgagatcgtgttggtcgtagtgtcatgccaaatggaacgccggacgtagtcatggtggccagcttggggtagttttcacgacaccttaaatggaagaaaaaaactttgaaccactgtctgaggcttgagaatgaaccaagatccaaactcaaaaagggcaaattccaaggagaattacatcaagtgccaagctggcctaacttcagtctccacccactcagtatggggaaactccatcgcataaaacccctccccccaacctaaagacgacgtactccaaaagctcgagaactaatcgaggtgcctggacggcgcccggtactccgtggagtcacatgaagcgacggctgaggacggaaaggcccttttcctttgtgtgggtgactcacccgcccgctctcccgagcgccgcgtcctccattttgagctccctgcagcagggccgggaagcggccatctttccgctcacgcaactggtgccgaccgggccagccttgccgcccagggcggggcgatacacggcggcgcgaggccaggcaccagagcaggccggccagcttgagactacccccgtccgattctcggtggccgcgctcgcaggccccgcctcgccgaacatgtgcgctgggacgcacgggccccgtcgccgcccgcggccccaaaaaccgaaataccagtgtgcagatcttggcccgcatttacaagactatcttgccagaaaaaaagcgtcgcagcaggtcatcaaaaattttaaatggctagagacttatcgaaagcagcgagacaggcgcgaaggtgccaccagattcgcacgcggcggccccagcgcccaggccaagcctcaactcaagcacgaggcgaaggggctccttaagcgcaaggcctcgaactctcccacccacttccaacccgaagctcgggatcaagaatcacgtactgcagccaggggcgtggaagtaattcaaggcacgcaagggccataacccgtaaagaggccaggcccgcgggaaccacacacggcacttacctgtgttctggcggcaaacccgttgcgaaaaagaacgttcacggcgactactgcacttatatacggttctcccccaccctcgggaaaaaggcggagccagtacacgacatcactttcccagtttaccccgcgccaccttctctaggcaccggttcaattgccgacccctccccccaacttctcggggactgtgggcgatgtgcgctctgcccactgacgggcaccggagcgatccgcgttaagatacattgatgagtttggacaaaccacaactagaatgcagtgaaaaaaatgctttatttgtgaaatttgtgatgctattgctttatttgtaaccattataagctgcaataaacaagttaacaacaacaattgcattcattttatgtttcaggttcagggggaggtgtgggaggttttttaaagcaagtaaaacctctacaaatgtggtatggctgattatgatcaattttcatggccacttgatgtattgttcatatttgcccagttcttggaggtcaatcagggactcattcaggttcttagccacctcattcagtctgtcaatctccttctggatgttcaccacagaggcattgatgccagagatgtctcccaggtccacatcagggctggtgtggttcttgaagtatttgtccagttcctccttgaaggagtccagttcaggttggagtgggtcatagactgtgttgttcacaatgccaatcaccacatcacagttgccagacacaaaggtgttgtctgtggtgataatctgtggttcatagaagttcctctgggtcacaaaccagtgggtgccattgctcacaaacactccctcccttggaaagtgagccttgccatcatggcagatggcaggggctgtggtgaagttcttctcctgggcaggcacataggtcacatgcaggaacaccactccatgaggggcagactgtggaaaactcatcaggtggtagcccttgccacagaagtccaccctcttgctttgtcccagcacacactcactcatcttggtggcagccaggttggcagatgccctaatctcagcagccctgataagttgttgggtcacataggtttggagggattggagtctgcctgtaatcagtctgtcaatctggacctcagcctccaccttgtccagtctgctcaggatgtcattcagcacagaggagatggctccaaagttgctggaaagttgcttcaccagggtgttcagagcctgggcattctggttcaccacatcttggagtttgcccagggcagaggctgtgctggacagggagtcctgaatcttgccaatggcagagttgaactggttggcaatcagtttctggttctcatagagcacattctgggtcactccaatgccattgaacctgtaagccatctgcatagcaaatgggatttggagggctgctcctgctccaaaggtccagccagaggtgatggtgccagccagcagggcagaggtgtattgggcaatcatctcatctgtcagcagtggaggcagcactgtcagtccattgaacttctgggcacaaatcaggtccctggcagcaatgtctcccagacagtctccatattgcttgatgaagccagcatcagccagggtcaccttgttgaacagcaggtcctcaatgaaggacctcttgcttggcttgcttgggtcaggcagaatctggctgaagttgaagcctccaaagtccttgattggaggtgtcttgtaaatctgcttcacctgggcaaacacctcctgggtgttcttgtcctgttccacagcaatgcctgtcagagccctgttaagttgggtacagaaggagccatattggagcagcaggttgctacactctgtgctgtctccacagatatacattgtacagtccacagaggtcttggtcatactcacaggcagaatctctgtggtcacagagatggtgaagttggttgggatggcaatgctgttgttgctgtaagccacagagttctctgctcccagactcattgtgtaggcaatgatgctctggcttgccacagacctcgacccaccgccaccggtctgggtctggtaggaggcacagatgcctgctccaattgggatgtcacactcataggagttgttcacatgctctgctccaatcagacagccagccctggtctggaacacattgctgcctgtgctgtagaccctccaggttggtgtaagttggtcagcatggatagccacaggcacctcagtacagttcacatcctggtagagcacagccacctggttgctggtgttggtgccaggtgtaatcacagacactcctccaaaggaacatggtgtgatgtccagaatctccaaggtctgtgggtccctcacagcatctgtggtgtcagcaatgtccctgccaaactgttggaatggcaggaacttcttgttgctctctgtcagcactcctgtgcctgtcagtccattgaagttgaagttcacacacttgttcttcaccaggttggtgctcttctttggtccacacactgtggcaggggcatggagcagttcaaaggacagcaccaccaccctgtatggttggtagcccactccattggttggttggaagccataggattggagtggaaagtaacagttgaagccctccactccattacatggtgtgctgccagcctggtaaatctctgtgctgatgtccctctcaaatggtttcaggttgctcttcctgaacagtctgtagaggtagttgtagttgcctcccaccttgctgtccaggttgttgctgttccaggcaatcacacagcctgtgaagtcatcaggcagtttgtagttgtagtcagcaatcttgcctgtttgtccaggggcaatctgtctcacctcatctcccctaatcacaaaggagtcagcatagacattggtgaaacacaggtcattcagtttggttgggctcactccataacacttgaaggtgctgaaggaggcagagttgtagagcacagagtagtcagccacacagttgctaatcctcttcctgttccaggcatagacagaggcaaacctggtggcattgaacacctctccaaatggacacaggttggtgatgtttggaaacctcacaatgctctctgttggttggaccctgaagttgctggtctggtagatgcccttctccactgtgaaggatttcagggtacacttggtctcagacagtgggtccagggcacagtccacagcatctgtgatggtgccattctcattgtatttcagcaggaaggtccttggttggaggtagcccacatagtaggctgctgctcctgctgtccagccagaggaggagtctccaggtgtcaggtaggacctgtgcagagccagcagggtctggaacctggtgatgttgatgccaattggcaggtccaccagtggttccaaggcagagaagccctgtggcaggtccctcaccaggttgattggtgtgtgtttgctgtaaatcttgaagtagccatcaatgttcttgaacacaaactccctcaggttcttgaagttgccctgcttgccctccaagtccatcaggaatggttggctcacatattcaaaggtacagttgttggcagaggagtagaccctgaactcagactccatccaggacttgttgttcttgtggtagtagactcccaggaatgggtcattacagaactggaactcacacaccttaatcaccacattggtggcattgttcacaatcagcagggactgggtcttgctgtccagggtggtgccaaaaatccagcccctgatgatgttgctcttctctgtgctggcaaagtagactccatcattgaatggcagcacagggttgtcaaacctcttggtgccattggtgccagacacatggatggcatggaaccaggtcacattgctgaagaatggcaggaacaggtcctgggtgctgtgcagcacagaggacctgaacaccttgtcagggtagtagactcccctggtgaaggagttggtgtaggcaggaggaagttgggtcctggtggtcaggttcacacactggctggacaccagtggcagcagcaccaggaacacaaacatggtggcaaatcggaggctggatcggtcccggtgtcttctatggaggtcaaaacagcgtggatggcgtctccaggcgatctgacggttcactaaacgagctcgtcgacgatctctatcactgatagggagatctctatcactgatagggagagctctgcttatatagacctcccaccgtacacgcctaccgcccatttgcgtcaatggggcggagttgttacgacattttggaaagtcccgttgattttggtgccaaaacaaactcccattgacgtcaatggggtggagacttggaaatccccgtgagtcaaaccgctatccacgcccattgatgtactgccaaaaccgcatcaccatggtaatagcgatgactaatacgtagatgtactgccaagtaggaaagtcccataaggtcatgtactgggcataatgccaggcgggccatttaccgtcattgacgtcaatagggggcgtacttggcatatgatacacttgatgtactgccaagtgggcagtttaccgtaaatactccacccattgacgtcaatggaaagtccctattggcgttactatgggaacatacgtcattattgacgtcaatgggcgggggtcgttgggcggtcagccaggcgggccatttaccgtaagttatgtaacgcggaactccatatatgggctatgaactaatgaccccgtaattgattactattacagaaattgggcgtggcttaagggtgggaaagaatatataaggtgggggtcttatgtagttttgtatctgttttgcagcagccgccgccgccatgagcaccaactcgtttgatggaagcattgtgagctcatatttgacaacgcgcatgcccccatgggccggggtgcgtcagaatgtgatgggctccagcattgatggtcgccccgtcctgcccgcaaactctactaccttgacctacgagaccgtgtctggaacgccgttggagactgcagcctccgccgccgcttcagccgctgcagccaccgcccgcgggattgtgactgactttgctttcctgagcccgcttgcaagcagtgcagcttcccgttcatccgcccgcgatgacaagttgacggctcttttggcacaattggattctttgacccgggaacttaatgtcgtttctcagcagctgttggatctgcgccagcaggtttctgccctgaaggcttcctcccctcccaatgcggtttaaaacataaataaaaaaccagactctgtttggatttggatcaagcaagtgtcttgctgtctttatttaggggttttgcgcgcgcggtaggcccgggaccagcggtctcggtcgttgagggtcctgtgtattttttccaggacgtggtaaaggtgactctggatgttcagatacatgggcataagcccgtctctggggtggaggtagcaccactgcagagcttcatgctgcggggtggtgttgtagatgatccagtcgtagcaggagcgctgggcgtggtgcctaaaaatgtctttcagtagcaagctgattgccaggggcaggcccttggtgtaagtgtttacaaagcggttaagctgggatgggtgcatacgtggggatatgagatgcatcttggactgtatttttaggttggctatgttcccagccatatccctccggggattcatgttgtgcagaaccaccagcacagtgtatccggtgcacttgggaaatttgtcatgtagcttagaaggaaatgcgtggaagaacttggagacgcccttgtgacctccaagattttccatgcattcgtccataatgatggcaatgggcccacgggcggcggcctgggcgaagatatttctgggatcactaacgtcatagttgtgttccaggatgagatcgtcataggccatttttacaaagcgcgggcggagggtgccagactgcggtataatggttccatccggcccaggggcgtagttaccctcacagatttgcatttcccacgctttgagttcagatggggggatcatgtctacctgcggggcgatgaagaaaacggtttccggggtaggggagatcagctgggaagaaagcaggttcctgagcagctgcgacttaccgcagccggtgggcccgtaaatcacacctattaccgggtgcaactggtagttaagagagctgcagctgccgtcatccctgagcaggggggccacttcgttaagcatgtccctgactcgcatgttttccctgaccaaatccgccagaaggcgctcgccgcccagcgatagcagttcttgcaaggaagcaaagtttttcaacggtttgagaccgtccgccgtaggcatgcttttgagcgtttgaccaagcagttccaggcggtcccacagctcggtcacctgctctacggcatctcgatccagcatatctcctcgtttcgcgggttggggcggctttcgctgtacggcagtagtcggtgctcgtccagacgggccagggtcatgtctttccacgggcgcagggtcctcgtcagcgtagtctgggtcacggtgaaggggtgcgctccgggctgcgcgctggccagggtgcgcttgaggctggtcctgctggtgctgaagcgctgccggtcttcgccctgcgcgtcggccaggtagcatttgaccatggtgtcatagtccagcccctccgcggcgtggcccttggcgcgcagcttgcccttggaggaggcgccgcacgaggggcagtgcagacttttgagggcgtagagcttgggcgcgagaaataccgattccggggagtaggcatccgcgccgcaggccccgcagacggtctcgcattccacgagccaggtgagctctggccgttcggggtcaaaaaccaggtttcccccatgctttttgatgcgtttcttacctctggtttccatgagccggtgtccacgctcggtgacgaaaaggctgtccgtgtccccgtatacagacttgagaggcctgtcctcgagcggtgttccgcggtcctcctcgtatagaaactcggaccactctgagacaaaggctcgcgtccaggccagcacgaaggaggctaagtgggaggggtagcggtcgttgtccactagggggtccactcgctccagggtgtgaagacacatgtcgccctcttcggcatcaaggaaggtgattggtttgtaggtgtaggccacgtgaccgggtgttcctgaaggggggctataaaagggggtgggggcgcgttcgtcctcactctcttccgcatcgctgtctgcgagggccagctgttggggtgagtactccctctgaaaagcgggcatgacttctgcgctaagattgtcagtttccaaaaacgaggaggatttgatattcacctggcccgcggtgatgcctttgagggtggccgcatccatctggtcagaaaagacaatctttttgttgtcaagcttggtggcaaacgacccgtagagggcgttggacagcaacttggcgatggagcgcagggtttggtttttgtcgcgatcggcgcgctccttggccgcgatgtttagctgcacgtattcgcgcgcaacgcaccgccattcgggaaagacggtggtgcgctcgtcgggcaccaggtgcacgcgccaaccgcggttgtgcagggtgacaaggtcaacgctggtggctacctctccgcgtaggcgctcgttggtccagcagaggcggccgcccttgcgcgagcagaatggcggtagggggtctagctgcgtctcgtccggggggtctgcgtccacggtaaagaccccgggcagcaggcgcgcgtcgaagtagtctatcttgcatccttgcaagtctagcgcctgctgccatgcgcgggcggcaagcgcgcgctcgtatgggttgagtgggggaccccatggcatggggtgggtgagcgcggaggcgtacatgccgcaaatgtcgtaaacgtagaggggctctctgagtattccaagatatgtagggtagcatcttccaccgcggatgctggcgcgcacgtaatcgtatagttcgtgcgagggagcgaggaggtcgggaccgaggttgctacgggcgggctgctctgctcggaagactatctgcctgaagatggcatgtgagttggatgatatggttggacgctggaagacgttgaagctggcgtctgtgagacctaccgcgtcacgcacgaaggaggcgtaggagtcgcgcagcttgttgaccagctcggcggtgacctgcacgtctagggcgcagtagtccagggtttccttgatgatgtcatacttatcctgtcccttttttttccacagctcgcggttgaggacaaactcttcgcggtctttccagtactcttggatcggaaacccgtcggcctccgaacggtaagagcctagcatgtagaactggttgacggcctggtaggcgcagcatcccttttctacgggtagcgcgtatgcctgcgcggccttccggagcgaggtgtgggtgagcgcaaaggtgtccctgaccatgactttgaggtactggtatttgaagtcagtgtcgtcgcatccgccctgctcccagagcaaaaagtccgtgcgctttttggaacgcggatttggcagggcgaaggtgacatcgttgaagagtatctttcccgcgcgaggcataaagttgcgtgtgatgcggaagggtcccggcacctcggaacggttgttaattacctgggcggcgagcacgatctcgtcaaagccgttgatgttgtggcccacaatgtaaagttccaagaagcgcgggatgcccttgatggaaggcaattttttaagttcctcgtaggtgagctcttcaggggagctgagcccgtgctctgaaagggcccagtctgcaagatgagggttggaagcgacgaatgagctccacaggtcacgggccattagcatttgcaggtggtcgcgaaaggtcctaaactggcgacctatggccattttttctggggtgatgcagtagaaggtaagcgggtcttgttcccagcggtcccatccaaggttcgcggctaggtctcgcgcggcagtcactagaggctcatctccgccgaacttcatgaccagcatgaagggcacgagctgcttcccaaaggcccccatccaagtataggtctctacatcgtaggtgacaaagagacgctcggtgcgaggatgcgagccgatcgggaagaactggatctcccgccaccaattggaggagtggctattgatgtggtgaaagtagaagtccctgcgacgggccgaacactcgtgctggcttttgtaaaaacgtgcgcagtactggcagcggtgcacgggctgtacatcctgcacgaggttgacctgacgaccgcgcacaaggaagcagagtgggaatttgagcccctcgcctggcgggtttggctggtggtcttctacttcggctgcttgtccttgaccgtctggctgctcgaggggagttacggtggatcggaccaccacgccgcgcgagcccaaagtccagatgtccgcgcgcggcggtcggagcttgatgacaacatcgcgcagatgggagctgtccatggtctggagctcccgcggcgtcaggtcaggcgggagctcctgcaggtttacctcgcatagacgggtcagggcgcgggctagatccaggtgatacctaatttccaggggctggttggtggcggcgtcgatggcttgcaagaggccgcatccccgcggcgcgactacggtaccgcgcggcgggcggtgggccgcgggggtgtccttggatgatgcatctaaaagcggtgacgcgggcgagcccccggaggtagggggggctccggacccgccgggagagggggcaggggcacgtcggcgccgcgcgcgggcaggagctggtgctgcgcgcgtaggttgctggcgaacgcgacgacgcggcggttgatctcctgaatctggcgcctctgcgtgaagacgacgggcccggtgagcttgaacctgaaagagagttcgacagaatcaatttcggtgtcgttgacggcggcctggcgcaaaatctcctgcacgtctcctgagttgtcttgataggcgatctcggccatgaactgctcgatctcttcctcctggagatctccgcgtccggctcgctccacggtggcggcgaggtcgttggaaatgcgggccatgagctgcgagaaggcgttgaggcctccctcgttccagacgcggctgtagaccacgcccccttcggcatcgcgggcgcgcatgaccacctgcgcgagattgagctccacgtgccgggcgaagacggcgtagtttcgcaggcgctgaaagaggtagttgagggtggtggcggtgtgttctgccacgaagaagtacataacccagcgtcgcaacgtggattcgttgatatcccccaaggcctcaaggcgctccatggcctcgtagaagtccacggcgaagttgaaaaactgggagttgcgcgccgacacggttaactcctcctccagaagacggatgagctcggcgacagtgtcgcgcacctcgcgctcaaaggctacaggggcctcttcttcttcttcaatctcctcttccataagggcctccccttcttcttcttctggcggcggtgggggaggggggacacggcggcgacgacggcgcaccgggaggcggtcgacaaagcgctcgatcatctccccgcggcgacggcgcatggtctcggtgacggcgcggccgttctcgcgggggcgcagttggaagacgccgcccgtcatgtcccggttatgggttggcggggggctgccatgcggcagggatacggcgctaacgatgcatctcaacaattgttgtgtaggtactccgccgccgagggacctgagcgagtccgcatcgaccggatcggaaaacctctcgagaaaggcgtctaaccagtcacagtcgcaaggtaggctgagcaccgtggcgggcggcagcgggcggcggtcggggttgtttctggcggaggtgctgctgatgatgtaattaaagtaggcggtcttgagacggcggatggtcgacagaagcaccatgtccttgggtccggcctgctgaatgcgcaggcggtcggccatgccccaggcttcgttttgacatcggcgcaggtctttgtagtagtcttgcatgagcctttctaccggcacttcttcttctccttcctcttgtcctgcatctcttgcatctatcgctgcggcggcggcggagtttggccgtaggtggcgccctcttcctcccatgcgtgtgaccccgaagcccctcatcggctgaagcagggctaggtcggcgacaacgcgctcggctaatatggcctgctgcacctgcgtgagggtagactggaagtcatccatgtccacaaagcggtggtatgcgcccgtgttgatggtgtaagtgcagttggccataacggaccagttaacggtctggtgacccggctgcgagagctcggtgtacctgagacgcgagtaagccctcgagtcaaatacgtagtcgttgcaagtccgcaccaggtactggtatcccaccaaaaagtgcggcggcggctggcggtagaggggccagcgtagggtggccggggctccgggggcgagatcttccaacataaggcgatgatatccgtagatgtacctggacatccaggtgatgccggcggcggtggtggaggcgcgcggaaagtcgcggacgcggttccagatgttgcgcagcggcaaaaagtgctccatggtcgggacgctctggccggtcaggcgcgcgcaatcgttgacgctctagcgtgcaaaaggagagcctgtaagcgggcactcttccgtggtctggtggataaattcgcaagggtatcatggcggacgaccggggttcgagccccgtatccggccgtccgccgtgatccatgcggttaccgcccgcgtgtcgaacccaggtgtgcgacgtcagacaacgggggagtgctccttttggcttccttccaggcgcggcggctgctgcgctagcttttttggccactggccgcgcgcagcgtaagcggttaggctggaaagcgaaagcattaagtggctcgctccctgtagccggagggttattttccaagggttgagtcgcgggacccccggttcgagtctcggaccggccggactgcggcgaacgggggtttgcctccccgtcatgcaagaccccgcttgcaaattcctccggaaacagggacgagccccttttttgcttttcccagatgcatccggtgctgcggcagatgcgcccccctcctcagcagcggcaagagcaagagcagcggcagacatgcagggcaccctcccctcctcctaccgcgtcaggaggggcgacatccgcggttgacgcggcagcagatggtgattacgaacccccgcggcgccgggcccggcactacctggacttggaggagggcgagggcctggcgcggctaggagcgccctctcctgagcggcacccaagggtgcagctgaagcgtgatacgcgtgaggcgtacgtgccgcggcagaacctgtttcgcgaccgcgagggagaggagcccgaggagatgcgggatcgaaagttccacgcagggcgcgagctgcggcatggcctgaatcgcgagcggttgctgcgcgaggaggactttgagcccgacgcgcgaaccgggattagtcccgcgcgcgcacacgtggcggccgccgacctggtaaccgcatacgagcagacggtgaaccaggagattaactttcaaaaaagctttaacaaccacgtgcgtacgcttgtggcgcgcgaggaggtggctataggactgatgcatctgtgggactttgtaagcgcgctggagcaaaacccaaatagcaagccgctcatggcgcagctgttccttatagtgcagcacagcagggacaacgaggcattcagggatgcgctgctaaacatagtagagcccgagggccgctggctgctcgatttgataaacatcctgcagagcatagtggtgcaggagcgcagcttgagcctggctgacaaggtggccgccatcaactattccatgcttagcctgggcaagttttacgcccgcaagatataccataccccttacgttcccatagacaaggaggtaaagatcgaggggttctacatgcgcatggcgctgaaggtgcttaccttgagcgacgacctgggcgtttatcgcaacgagcgcatccacaaggccgtgagcgtgagccggcggcgcgagctcagcgaccgcgagctgatgcacagcctgcaaagggccctggctggcacgggcagcggcgatagagaggccgagtcctactttgacgcgggcgctgacctgcgctgggccccaagccgacgcgccctggaggcagctggggccggacctgggctggcggtggcacccgcgcgcgctggcaacgtcggcggcgtggaggaatatgacgaggacgatgagtacgagccagaggacggcgagtactaagcggtgatgtttctgatcagatgatgcaagacgcaacggacccggcggtgcgggcggcgctgcagagccagccgtccggccttaactccacggacgactggcgccaggtcatggaccgcatcatgtcgctgactgcgcgcaatcctgacgcgttccggcagcagccgcaggccaaccggctctccgcaattctggaagcggtggtcccggcgcgcgcaaaccccacgcacgagaaggtgctggcgatcgtaaacgcgctggccgaaaacagggccatccggcccgacgaggccggcctggtctacgacgcgctgcttcagcgcgtggctcgttacaacagcggcaacgtgcagaccaacctggaccggctggtgggggatgtgcgcgaggccgtggcgcagcgtgagcgcgcgcagcagcagggcaacctgggctccatggttgcactaaacgccttcctgagtacacagcccgccaacgtgccgcggggacaggaggactacaccaactttgtgagcgcactgcggctaatggtgactgagacaccgcaaagtgaggtgtaccagtctgggccagactattttttccagaccagtagacaaggcctgcagaccgtaaacctgagccaggctttcaaaaacttgcaggggctgtggggggtgcgggctcccacaggcgaccgcgcgaccgtgtctagcttgctgacgcccaactcgcgcctgttgctgctgctaatagcgcccttcacggacagtggcagcgtgtcccgggacacatacctaggtcacttgctgacactgtaccgcgaggccataggtcaggcgcatgtggacgagcatactttccaggagattacaagtgtcagccgcgcgctggggcaggaggacacgggcagcctggaggcaaccctaaactacctgctgaccaaccggcggcagaagatcccctcgttgcacagtttaaacagcgaggaggagcgcattttgcgctacgtgcagcagagcgtgagccttaacctgatgcgcgacggggtaacgcccagcgtggcgctggacatgaccgcgcgcaacatggaaccgggcatgtatgcctcaaaccggccgtttatcaaccgcctaatggactacttgcatcgcgcggccgccgtgaaccccgagtatttcaccaatgccatcttgaacccgcactggctaccgccccctggtttctacaccgggggattcgaggtgcccgagggtaacgatggattcctctgggacgacatagacgacagcgtgttttccccgcaaccgcagaccctgctagagttgcaacagcgcgagcaggcagaggcggcgctgcgaaaggaaagcttccgcaggccaagcagcttgtccgatctaggcgctgcggccccgcggtcagatgctagtagcccatttccaagcttgatagggtctcttaccagcactcgcaccacccgcccgcgcctgctgggcgaggaggagtacctaaacaactcgctgctgcagccgcagcgcgaaaaaaacctgcctccggcatttcccaacaacgggatagagagcctagtggacaagatgagtagatggaagacgtacgcgcaggagcacagggacgtgccaggcccgcgcccgcccacccgtcgtcaaaggcacgaccgtcagcggggtctggtgtgggaggacgatgactcggcagacgacagcagcgtcctggatttgggagggagtggcaacccgtttgcgcaccttcgccccaggctggggagaatgttttaaaaaaaaaaaagcatgatgcaaaataaaaaactcaccaaggccatggcaccgagcgttggttttcttgtattccccttagtatgcggcgcgcggcgatgtatgaggaaggtcctcctccctcctacgagagtgtggtgagcgcggcgccagtggcggcggcgctgggttctcccttcgatgctcccctggacccgccgtttgtgcctccgcggtacctgcggcctaccggggggagaaacagcatccgttactctgagttggcacccctattcgacaccacccgtgtgtacctggtggacaacaagtcaacggatgtggcatccctgaactaccagaacgaccacagcaactttctgaccacggtcattcaaaacaatgactacagcccgggggaggcaagcacacagaccatcaatcttgacgaccggtcgcactggggcggcgacctgaaaaccatcctgcataccaacatgccaaatgtgaacgagttcatgtttaccaataagtttaaggcgcgggtgatggtgtcgcgcttgcctactaaggacaatcaggtggagctgaaatacgagtgggtggagttcacgctgcccgagggcaactactccgagaccatgaccatagaccttatgaacaacgcgatcgtggagcactacttgaaagtgggcagacagaacggggttctggaaagcgacatcggggtaaagtttgacacccgcaacttcagactggggtttgaccccgtcactggtcttgtcatgcctggggtatatacaaacgaagccttccatccagacatcattttgctgccaggatgcggggtggacttcacccacagccgcctgagcaacttgttgggcatccgcaagcggcaacccttccaggagggctttaggatcacctacgatgatctggagggtggtaacattcccgcactgttggatgtggacgcctaccaggcgagcttgaaagatgacaccgaacagggcgggggtggcgcaggcggcagcaacagcagtggcagcggcgcggaagagaactccaacgcggcagccgcggcaatgcagccggtggaggacatgaacgatcatgccattcgcggcgacacctttgccacacgggctgaggagaagcgcgctgaggccgaagcagcggccgaagctgccgcccccgctgcgcaacccgaggtcgagaagcctcagaagaaaccggtgatcaaacccctgacagaggacagcaagaaacgcagttacaacctaataagcaatgacagcaccttcacccagtaccgcagctggtaccttgcatacaactacggcgaccctcagaccggaatccgctcatggaccctgctttgcactcctgacgtaacctgcggctcggagcaggtctactggtcgttgccagacatgatgcaagaccccgtgaccttccgctccacgcgccagatcagcaactttccggtggtgggcgccgagctgttgcccgtgcactccaagagcttctacaacgaccaggccgtctactcccaactcatccgccagtttacctctctgacccacgtgttcaatcgctttcccgagaaccagattttggcgcgcccgccagcccccaccatcaccaccgtcagtgaaaacgttcctgctctcacagatcacgggacgctaccgctgcgcaacagcatcggaggagtccagcgagtgaccattactgacgccagacgccgcacctgcccctacgtttacaaggccctgggcatagtctcgccgcgcgtcctatcgagccgcactttttgagcaagcatgtccatccttatatcgcccagcaataacacaggctggggcctgcgcttcccaagcaagatgtttggcggggccaagaagcgctccgaccaacacccagtgcgcgtgcgcgggcactaccgcgcgccctggggcgcgcacaaacgcggccgcactgggcgcaccaccgtcgatgacgccatcgacgcggtggtggaggaggcgcgcaactacacgcccacgccgccaccagtgtccacagtggacgcggccattcagaccgtggtgcgcggagcccggcgctatgctaaaatgaagagacggcggaggcgcgtagcacgtcgccaccgccgccgacccggcactgccgcccaacgcgcggcggcggccctgcttaaccgcgcacgtcgcaccggccgacgggcggccatgcgggccgctcgaaggctggccgcgggtattgtcactgtgccccccaggtccaggcgacgagcggccgccgcagcagccgcggccattagtgctatgactcagggtcgcaggggcaacgtgtattgggtgcgcgactcggttagcggcctgcgcgtgcccgtgcgcacccgccccccgcgcaactagattgcaagaaaaaactacttagactcgtactgttgtatgtatccagcggcggcggcgcgcaacgaagctatgtccaagcgcaaaatcaaagaagagatgctccaggtcatcgcgccggagatctatggccccccgaagaaggaagagcaggattacaagccccgaaagctaaagcgggtcaaaaagaaaaagaaagatgatgatgatgaacttgacgacgaggtggaactgctgcacgctaccgcgcccaggcgacgggtacagtggaaaggtcgacgcgtaaaacgtgttttgcgacccggcaccaccgtagtctttacgcccggtgagcgctccacccgcacctacaagcgcgtgtatgatgaggtgtacggcgacgaggacctgcttgagcaggccaacgagcgcctcggggagtttgcctacggaaagcggcataaggacatgctggcgttgccgctggacgagggcaacccaacacctagcctaaagcccgtaacactgcagcaggtgctgcccgcgcttgcaccgtccgaagaaaagcgcggcctaaagcgcgagtctggtgacttggcacccaccgtgcagctgatggtacccaagcgccagcgactggaagatgtcttggaaaaaatgaccgtggaacctgggctggagcccgaggtccgcgtgcggccaatcaagcaggtggcgccgggactgggcgtgcagaccgtggacgttcagatacccactaccagtagcaccagtattgccaccgccacagagggcatggagacacaaacgtccccggttgcctcagcggtggcggatgccgcggtgcaggcggtcgctgcggccgcgtccaagacctctacggaggtgcaaacggacccgtggatgtttcgcgtttcagccccccggcgcccgcgccgttcgaggaagtacggcgccgccagcgcgctactgcccgaatatgccctacatccttccattgcgcctacccccggctatcgtggctacacctaccgccccagaagacgagcaactacccgacgccgaaccaccactggaacccgccgccgccgtcgccgtcgccagcccgtgctggccccgatttccgtgcgcagggtggctcgcgaaggaggcaggaccctggtgctgccaacagcgcgctaccaccccagcatcgtttaaaagccggtctttgtggttcttgcagatatggccctcacctgccgcctccgtttcccggtgccgggattccgaggaagaatgcaccgtaggaggggcatggccggccacggcctgacgggcggcatgcgtcgtgcgcaccaccggcggcggcgcgcgtcgcaccgtcgcatgcgcggcggtatcctgcccctccttattccactgatcgccgcggcgattggcgccgtgcccggaattgcatccgtggccttgcaggcgcagagacactgattaaaaacaagttgcatgtggaaaaatcaaaataaaaagtctggactctcacgctcgcttggtcctgtaactattttgtagaatggaagacatcaactttgcgtctctggccccgcgacacggctcgcgcccgttcatgggaaactggcaagatatcggcaccagcaatatgagcggtggcgccttcagctggggctcgctgtggagcggcattaaaaatttcggttccaccgttaagaactatggcagcaaggcctggaacagcagcacaggccagatgctgagggataagttgaaagagcaaaatttccaacaaaaggtggtagatggcctggcctctggcattagcggggtggtggacctggccaaccaggcagtgcaaaataagattaacagtaagcttgatccccgccctcccgtagaggagcctccaccggccgtggagacagtgtctccagaggggcgtggcgaaaagcgtccgcgccccgacagggaagaaactctggtgacgcaaatagacgagcctccctcgtacgaggaggcactaaagcaaggcctgcccaccacccgtcccatcgcgcccatggctaccggagtgctgggccagcacacacccgtaacgctggacctgcctccccccgccgacacccagcagaaacctgtgctgccaggcccgaccgccgttgttgtaacccgtcctagccgcgcgtccctgcgccgcgccgccagcggtccgcgatcgttgcggcccgtagccagtggcaactggcaaagcacactgaacagcatcgtgggtctgggggtgcaatccctgaagcgccgacgatgcttctgatagctaacgtgtcgtatgtgtgtcatgtatgcgtccatgtcgccgccagaggagctgctgagccgccgcgcgcccgctttccaagatggctaccccttcgatgatgccgcagtggtcttacatgcacatctcgggccaggacgcctcggagtacctgagccccgggctggtgcagtttgcccgcgccaccgagacgtacttcagcctgaataacaagtttagaaaccccacggtggcgcctacgcacgacgtgaccacagaccggtcccagcgtttgacgctgcggttcatccctgtggaccgtgaggatactgcgtactcgtacaaggcgcggttcaccctagctgtgggtgataaccgtgtgctggacatggcttccacgtactttgacatccgcggcgtgctggacaggggccctacttttaagccctactctggcactgcctacaacgccctggctcccaagggtgccccaaatccttgcgaatgggatgaagctgctactgctcttgaaataaacctagaagaagaggacgatgacaacgaagacgaagtagacgagcaagctgagcagcaaaaaactcacgtatttgggcaggcgccttattctggtataaatattacaaaggagggtattcaaataggtgtcgaaggtcaaacacctaaatatgccgataaaacatttcaacctgaacctcaaataggagaatctcagtggtacgaaacagaaattaatcatgcagctgggagagtcctaaaaaagactaccccaatgaaaccatgttacggttcatatgcaaaacccacaaatgaaaatggagggcaaggcattcttgtaaagcaacaaaatggaaagctagaaagtcaagtggaaatgcaatttttctcaactactgaggcagccgcaggcaatggtgataacttgactcctaaagtggtattgtacagtgaagatgtagatatagaaaccccagacactcatatttcttacatgcccactattaaggaaggtaactcacgagaactaatgggccaacaatctatgcccaacaggcctaattacattgcttttagggacaattttattggtctaatgtattacaacagcacgggtaatatgggtgttctggcgggccaagcatcgcagttgaatgctgttgtagatttgcaagacagaaacacagagctttcataccagcttttgcttgattccattggtgatagaaccaggtacttttctatgtggaatcaggctgttgacagctatgatccagatgttagaattattgaaaatcatggaactgaagatgaacttccaaattactgctttccactgggaggtgtgattaatacagagactcttaccaaggtaaaacctaaaacaggtcaggaaaatggatgggaaaaagatgctacagaattttcagataaaaatgaaataagagttggaaataattttgccatggaaatcaatctaaatgccaacctgtggagaaatttcctgtactccaacatagcgctgtatttgcccgacaagctaaagtacagtccttccaacgtaaaaatttctgataacccaaacacctacgactacatgaacaagcgagtggtggctcccgggctagtggactgctacattaaccttggagcacgctggtcccttgactatatggacaacgtcaacccatttaaccaccaccgcaatgctggcctgcgctaccgctcaatgttgctgggcaatggtcgctatgtgcccttccacatccaggtgcctcagaagttctttgccattaaaaacctccttctcctgccgggctcatacacctacgagtggaacttcaggaaggatgttaacatggttctgcagagctccctaggaaatgacctaagggttgacggagccagcattaagtttgatagcatttgcctttacgccaccttcttccccatggcccacaacaccgcctccacgcttgaggccatgcttagaaacgacaccaacgaccagtcctttaacgactatctctccgccgccaacatgctctaccctatacccgccaacgctaccaacgtgcccatatccatcccctcccgcaactgggcggctttccgcggctgggccttcacgcgccttaagactaaggaaaccccatcactgggctcgggctacgacccttattacacctactctggctctataccctacctagatggaaccttttacctcaaccacacctttaagaaggtggccattacctttgactcttctgtcagctggcctggcaatgaccgcctgcttacccccaacgagtttgaaattaagcgctcagttgacggggagggttacaacgttgcccagtgtaacatgaccaaagactggttcctggtacaaatgctagctaactataacattggctaccagggcttctatatcccagagagctacaaggaccgcatgtactccttctttagaaacttccagcccatgagccgtcaggtggtggatgatactaaatacaaggactaccaacaggtgggcatcctacaccaacacaacaactctggatttgttggctaccttgcccccaccatgcgcgaaggacaggcctaccctgctaacttcccctatccgcttataggcaagaccgcagttgacagcattacccagaaaaagtttctttgcgatcgcaccctttggcgcatcccattctccagtaactttatgtccatgggcgcactcacagacctgggccaaaaccttctctacgccaactccgcccacgcgctagacatgacttttgaggtggatcccatggacgagcccacccttctttatgttttgtttgaagtctttgacgtggtccgtgtgcaccagccgcaccgcggcgtcatcgaaaccgtgtacctgcgcacgcccttctcggccggcaacgccacaacataaagaagcaagcaacatcaacaacagctgccgccatgggctccagtgagcaggaactgaaagccattgtcaaagatcttggttgtgggccatattttttgggcacctatgacaagcgctttccaggctttgtttctccacacaagctcgcctgcgccatagtcaatacggccggtcgcgagactgggggcgtacactggatggcctttgcctggaacccgcactcaaaaacatgctacctctttgagccctttggcttttctgaccagcgactcaagcaggtttaccagtttgagtacgagtcactcctgcgccgtagcgccattgcttcttcccccgaccgctgtataacgctggaaaagtccacccaaagcgtacaggggcccaactcggccgcctgtggactattctgctgcatgtttctccacgcctttgccaactggccccaaactcccatggatcacaaccccaccatgaaccttattaccggggtacccaactccatgctcaacagtccccaggtacagcccaccctgcgtcgcaaccaggaacagctctacagcttcctggagcgccactcgccctacttccgcagccacagtgcgcagattaggagcgccacttctttttgtcacttgaaaaacatgtaaaaataatgtactagagacactttcaataaaggcaaatgcttttatttgtacactctcgggtgattatttacccccacccttgccgtctgcgccgtttaaaaatcaaaggggttctgccgcgcatcgctatgcgccactggcagggacacgttgcgatactggtgtttagtgctccacttaaactcaggcacaaccatccgcggcagctcggtgaagttttcactccacaggctgcgcaccatcaccaacgcgtttagcaggtcgggcgccgatatcttgaagtcgcagttggggcctccgccctgcgcgcgcgagttgcgatacacagggttgcagcactggaacactatcagcgccgggtggtgcacgctggccagcacgctcttgtcggagatcagatccgcgtccaggtcctccgcgttgctcagggcgaacggagtcaactttggtagctgccttcccaaaaagggcgcgtgcccaggctttgagttgcactcgcaccgtagtggcatcaaaaggtgaccgtgcccggtctgggcgttaggatacagcgcctgcataaaagccttgatctgcttaaaagccacctgagcctttgcgccttcagagaagaacatgccgcaagacttgccggaaaactgattggccggacaggccgcgtcgtgcacgcagcaccttgcgtcggtgttggagatctgcaccacatttcggccccaccggttcttcacgatcttggccttgctagactgctccttcagcgcgcgctgcccgttttcgctcgtcacatccatttcaatcacgtgctccttatttatcataatgcttccgtgtagacacttaagctcgccttcgatctcagcgcagcggtgcagccacaacgcgcagcccgtgggctcgtgatgcttgtaggtcacctctgcaaacgactgcaggtacgcctgcaggaatcgccccatcatcgtcacaaaggtcttgttgctggtgaaggtcagctgcaacccgcggtgctcctcgttcagccaggtcttgcatacggccgccagagcttccacttggtcaggcagtagtttgaagttcgcctttagatcgttatccacgtggtacttgtccatcagcgcgcgcgcagcctccatgcccttctcccacgcagacacgatcggcacactcagcgggttcatcaccgtaatttcactttccgcttcgctgggctcttcctcttcctcttgcgtccgcataccacgcgccactgggtcgtcttcattcagccgccgcactgtgcgcttacctcctttgccatgcttgattagcaccggtgggttgctgaaacccaccatttgtagcgccacatcttctctttcttcctcgctgtccacgattacctctggtgatggcgggcgctcgggcttgggagaagggcgcttctttttcttcttgggcgcaatggccaaatccgccgccgaggtcgatggccgcgggctgggtgtgcgcggcaccagcgcgtcttgtgatgagtcttcctcgtcctcggactcgatacgccgcctcatccgcttttttgggggcgcccggggaggcggcggcgacggggacggggacgacacgtcctccatggttgggggacgtcgcgccgcaccgcgtccgcgctcgggggtggtttcgcgctgctcctcttcccgactggccatttccttctcctataggcagaaaaagatcatggagtcagtcgagaagaaggacagcctaaccgccccctctgagttcgccaccaccgcctccaccgatgccgccaacgcgcctaccaccttccccgtcgaggcacccccgcttgaggaggaggaagtgattatcgagcaggacccaggttttgtaagcgaagacgacgaggaccgctcagtaccaacagaggataaaaagcaagaccaggacaacgcagaggcaaacgaggaacaagtcgggcggggggacgaaaggcatggcgactacctagatgtgggagacgacgtgctgttgaagcatctgcagcgccagtgcgccattatctgcgacgcgttgcaagagcgcagcgatgtgcccctcgccatagcggatgtcagccttgcctacgaacgccacctattctcaccgcgcgtaccccccaaacgccaagaaaacggcacatgcgagcccaacccgcgcctcaacttctaccccgtatttgccgtgccagaggtgcttgccacctatcacatctttttccaaaactgcaagatacccctatcctgccgtgccaaccgcagccgagcggacaagcagctggccttgcggcagggcgctgtcatacctgatatcgcctcgctcaacgaagtgccaaaaatctttgagggtcttggacgcgacgagaagcgcgcggcaaacgctctgcaacaggaaaacagcgaaaatgaaagtcactctggagtgttggtggaactcgagggtgacaacgcgcgcctagccgtactaaaacgcagcatcgaggtcacccactttgcctacccggcacttaacctaccccccaaggtcatgagcacagtcatgagtgagctgatcgtgcgccgtgcgcagcccctggagagggatgcaaatttgcaagaacaaacagaggagggcctacccgcagttggcgacgagcagctagcgcgctggcttcaaacgcgcgagcctgccgacttggaggagcgacgcaaactaatgatggccgcagtgctcgttaccgtggagcttgagtgcatgcagcggttctttgctgacccggagatgcagcgcaagctagaggaaacattgcactacacctttcgacagggctacgtacgccaggcctgcaagatctccaacgtggagctctgcaacctggtctcctaccttggaattttgcacgaaaaccgccttgggcaaaacgtgcttcattccacgctcaagggcgaggcgcgccgcgactacgtccgcgactgcgtttacttatttctatgctacacctggcagacggccatgggcgtttggcagcagtgcttggaggagtgcaacctcaaggagctgcagaaactgctaaagcaaaacttgaaggacctatggacggccttcaacgagcgctccgtggccgcgcacctggcggacatcattttccccgaacgcctgcttaaaaccctgcaacagggtctgccagacttcaccagtcaaagcatgttgcagaactttaggaactttatcctagagcgctcaggaatcttgcccgccacctgctgtgcacttcctagcgactttgtgcccattaagtaccgcgaatgccctccgccgctttggggccactgctaccttctgcagctagccaactaccttgcctaccactctgacataatggaagacgtgagcggtgacggtctactggagtgtcactgtcgctgcaacctatgcaccccgcaccgctccctggtttgcaattcgcagctgcttaacgaaagtcaaattatcggtacctttgagctgcagggtccctcgcctgacgaaaagtccgcggctccggggttgaaactcactccggggctgtggacgtcggcttaccttcgcaaatttgtacctgaggactaccacgcccacgagattaggttctacgaagaccaatcccgcccgcctaatgcggagcttaccgcctgcgtcattacccagggccacattcttggccaattgcaagccatcaacaaagcccgccaagagtttctgctacgaaagggacggggggtttacttggacccccagtccggcgaggagctcaacccaatccccccgccgccgcagccctatcagcagcagccgcgggcccttgcttcccaggatggcacccaaaaagaagctgcagctgccgccgccacccacggacgaggaggaatactgggacagtcaggcagaggaggttttggacgaggaggaggaggacatgatggaagactgggagagcctagacgaggaagcttccgaggtcgaagaggtgtcagacgaaacaccgtcaccctcggtcgcattcccctcgccggcgccccagaaatcggcaaccggttccagcatggctacaacctccgctcctcaggcgccgccggcactgcccgttcgccgacccaaccgtagatgggacaccactggaaccagggccggtaagtccaagcagccgccgccgttagcccaagagcaacaacagcgccaaggctaccgctcatggcgcgggcacaagaacgccatagttgcttgcttgcaagactgtgggggcaacatctccttcgcccgccgctttcttctctaccatcacggcgtggccttcccccgtaacatcctgcattactaccgtcatctctacagcccatactgcaccggcggcagcggcagcaacagcagcggccacacagaagcaaaggcgaccggatagcaagactctgacaaagcccaagaaatccacagcggcggcagcagcaggaggaggagcgctgcgtctggcgcccaacgaacccgtatcgacccgcgagcttagaaacaggatttttcccactctgtatgctatatttcaacagagcaggggccaagaacaagagctgaaaataaaaaacaggtctctgcgatccctcacccgcagctgcctgtatcacaaaagcgaagatcagcttcggcgcacgctggaagacgcggaggctctcttcagtaaatactgcgcgctgactcttaaggactagtttcgcgccctttctcaaatttaagcgcgaaaactacgtcatctccagcggccacacccggcgccagcacctgttgtcagcgccattatgagcaaggaaattcccacgccctacatgtggagttaccagccacaaatgggacttgcggctggagctgcccaagactactcaacccgaataaactacatgagcgcgggaccccacatgatatcccgggtcaacggaatacgcgcccaccgaaaccgaattctcctggaacaggcggctattaccaccacacctcgtaataaccttaatccccgtagttggcccgctgccctggtgtaccaggaaagtcccgctcccaccactgtggtacttcccagagacgcccaggccgaagttcagatgactaactcaggggcgcagcttgcgggcggctttcgtcacagggtgcggtcgcccgggcagggtataactcacctgacaatcagagggcgaggtattcagctcaacgacgagtcggtgagctcctcgcttggtctccgtccggacgggacatttcagatcggcggcgccggccgctcttcattcacgcctcgtcaggcaatcctaactctgcagacctcgtcctctgagccgcgctctggaggcattggaactctgcaatttattgaggagtttgtgccatcggtctactttaaccccttctcgggacctcccggccactatccggatcaatttattcctaactttgacgcggtaaaggactcggcggacggctacgactgaatgttaagtggagaggcagagcaactgcgcctgaaacacctggtccactgtcgccgccacaagtgctttgcccgcgactccggtgagttttgctactttgaattgcccgaggatcatatcgagggcccggcgcacggcgtccggcttaccgcccagggagagcttgcccgtagcctgattcgggagtttacccagcgccccctgctagttgagcgggacaggggaccctgtgttctcactgtgatttgcaactgtcctaaccctggattacatcaagatcctctagttaatgtcaggtcgcctaagtcgattaactagagtacccggggatcttattccctttaactaataaaaaaaaataataaagcatcacttacttaaaatcagttagcaaatttctgtccagtttattcagcagcacctccttgccctcctcccagctctggtattgcagcttcctcctggctgcaaactttctccacaatctaaatggaatgtcagtttcctcctgttcctgtccatccgcacccactatcttcatgttgttgcagatgaagcgcgcaagaccgtctgaagataccttcaaccccgtgtatccatatgacacggaaaccggtcctccaactgtgccttttcttactcctccctttgtatcccccaatgggtttcaagagagtccccctggggtactctctttgcgcctatccgaacctctagttacctccaatggcatgcttgcgctcaaaatgggcaacggcctctctctggacgaggccggcaaccttacctcccaaaatgtaaccactgtgagcccacctctcaaaaaaaccaagtcaaacataaacctggaaatatctgcacccctcacagttacctcagaagccctaactgtggctgccgccgcacctctaatggtcgcgggcaacacactcaccatgcaatcacaggccccgctaaccgtgcacgactccaaacttagcattgccacccaaggacccctcacagtgtcagaaggaaagctagccctgcaaacatcaggccccctcaccaccaccgatagcagtacccttactatcactgcctcaccccctctaactactgccactggtagcttgggcattgacttgaaagagcccatttatacacaaaatggaaaactaggactaaagtacggggctcctttgcatgtaacagacgacctaaacactttgaccgtagcaactggtccaggtgtgactattaataatacttccttgcaaactaaagttactggagccttgggttttgattcacaaggcaatatgcaacttaatgtagcaggaggactaaggattgattctcaaaacagacgccttatacttgatgttagttatccgtttgatgctcaaaaccaactaaatctaagactaggacagggccctctttttataaactcagcccacaacttggatattaactacaacaaaggcctttacttgtttacagcttcaaacaattccaaaaagcttgaggttaacctaagcactgccaaggggttgatgtttgacgctacagccatagccattaatgcaggagatgggcttgaatttggttcacctaatgcaccaaacacaaatcccctcaaaacaaaaattggccatggcctagaatttgattcaaacaaggctatggttcctaaactaggaactggccttagttttgacagcacaggtgccattacagtaggaaacaaaaataatgataagctaactttgtggaccggaataaaccctccacctaactgtcaaattgtggaaaacactaatacaaatgatggcaaacttactttagtattagtaaaaaatggagggcttgttaatggctacgtgtctctagttggtgtatcagacactgtgaaccaaatgttcacacaaaagacagcaaacatccaattaagattatattttgactcttctggaaatctattaactgaggaatcagacttaaaaattccacttaaaaataaatcttctacagcgaccagtgaaactgtagccagcagcaaagcctttatgccaagtactacagcttatcccttcaacaccactactagggatagtgaaaactacattcatggaatatgttactacatgactagttatgatagaagtctatttcccttgaacatttctataatgctaaacagccgtatgatttcttccaatgttgcctatgccatacaatttgaatggaatctaaatgcaagtgaatctccagaaagcaacatagctacgctgaccacatccccctttttcttttcttacattacagaagacgacaactaaagaatcgtttgtgttatgtttcaacgtgtttatttttcaattgcagaaaatttcaagtcatttttcattcagtagtatagccccaccaccacatagcttatacagatcaccgtaccttaatcaaactcacagaaccctagtattcaacctgccacctccctcccaacacacagagtacacagtcctttctccccggctggccttaaaaagcatcatatcatgggtaacagacatattcttaggtgttatattccacacggtttcctgtcgagccaaacgctcatcagtgatattaataaactccccgggcagctcacttaagttcatgtcgctgtccagctgctgagccacaggctgctgtccaacttgcggttgcttaacgggcggcgaaggagaagtccacgcctacatgggggtagagtcataatcgtgcatcaggatagggcggtggtgctgcagcagcgcgcgaataaactgctgccgccgccgctccgtcctgcaggaatacaacatggcagtggtctcctcagcgatgattcgcaccgcccgcagcataaggcgccttgtcctccgggcacagcagcgcaccctgatctcacttaaatcagcacagtaactgcagcacagcaccacaatattgttcaaaatcccacagtgcaaggcgctgtatccaaagctcatggcggggaccacagaacccacgtggccatcataccacaagcgcaggtagattaagtggcgacccctcataaacacgctggacataaacattacctcttttggcatgttgtaattcaccacctcccctctgattaaacatggcgccatccaccaccatcctaaaccagctggccaaaacctgcccgccggctatacactgcagggaaccgggactggaacaatgacagtggagagcccaggactcgtaaccatggatcatcatgctcgtcatgatatcaatgttggcacaacacaggcacacgtgcatacacttcctcaggattacaagctcctcccgcgttagaaccatatcccagggaacaacccattcctgaatcagcgtaaatcccacactgcagggaagacctcgcacgtaactcacgttgtgcattgtcaaagtgttacattcgggcagcagcggatgatcctccagtatggtagcgcgggtttctgtctcaaaaggaggtagacgatccctactgtacggagtgcgccgagacaaccgagatcgtgttggtcgtagtgtcatgccaaatggaacgccggacgtagtcatatttcctgaagcaaaaccaggtgcgggcgtgacaaacagatctgcgtctccggtctcgccgcttagatcgctctgtgtagtagttgtagtatatccactctctcaaagcatccaggcgccccctggcttcgggttctatgtaaactccttcatgcgccgctgccctgataacatccaccaccgcagaataagccacacccagccaacctacacattcgttctgcgagtcacacacgggaggagcgggaagagctggaagaaccatgtttttttttttattccaaaagattatccaaaacctcaaaatgaagatctattaagtgaacgcgctcccctccggtggcgtggtcaaactctacagccaaagaacagataatggcatttgtaagatgttgcacaatggcttccaaaaggcaaacggccctcacgtccaagtggacgtaaaggctaaacccttcagggtgaatctcctctataaacattccagcaccttcaaccatgcccaaataattctcatctcgccaccttctcaatatatctctaagcaaatcccgaatattaagtccggccattgtaaaaatctgctccagagcgccctccaccttcagcctcaagcagcgaatcatgattgcaaaaattcaggttcctcacagacctgtataagattcaaaagcggaacattaacaaaaataccgcgatcccgtaggtcccttcgcagggccagctgaacataatcgtgcaggtctgcacggaccagcgcggccacttccccgccaggaaccatgacaaaagaacccacactgattatgacacgcatactcggagctatgctaaccagcgtagccccgatgtaagcttgttgcatgggcggcgatataaaatgcaaggtgctgctcaaaaaatcaggcaaagcctcgcgcaaaaaagaaagcacatcgtagtcatgctcatgcagataaaggcaggtaagctccggaaccaccacagaaaaagacaccatttttctctcaaacatgtctgcgggtttctgcataaacacaaaataaaataacaaaaaaacatttaaacattagaagcctgtcttacaacaggaaaaacaacccttataagcataagacggactacggccatgccggcgtgaccgtaaaaaaactggtcaccgtgattaaaaagcaccaccgacagctcctcggtcatgtccggagtcataatgtaagactcggtaaacacatcaggttgattcacatcggtcagtgctaaaaagcgaccgaaatagcccgggggaatacatacccgcaggcgtagagacaacattacagcccccataggaggtataacaaaattaataggagagaaaaacacataaacacctgaaaaaccctcctgcctaggcaaaatagcaccctcccgctccagaacaacatacagcgcttccacagcggcagccataacagtcagccttaccagtaaaaaagaaaacctattaaaaaaacaccactcgacacggcaccagctcaatcagtcacagtgtaaaaaagggccaagtgcagagcgagtatatataggactaaaaaatgacgtaacggttaaagtccacaaaaaacacccagaaaaccgcacgcgaacctacgcccagaaacgaaagccaaaaaacccacaacttcctcaaatcgtcacttccgttttcccacgttacgtcacttcccattttaagaaaactacaattcccaacacatacaagttactccgccctaaaacctacgtcacccgccccgttcccacgccccgcgccacgtcacaaactccaccccctcattatcatattggcttcaatccaaaataaggtatattattgatgatg

SEQ ID NO: 8 - DNA, 37105 bp, Artificial Sequence
  Adk35F2-E4orf6/Spike-E4dl355(E4re#3)
ttaattaacatcatcaataatataccttattttggattgaagccaatatgataatgagggggtggagtttgtgacgtggcgcggggcgtgggaacggggcgggtgacgtagtagtgtggcggaagtgtgatgttgcaagtgtggcggaacacatgtaagcgacggatgtggcaaaagtgacgtttttggtgtgcgccggtgtacacaggaagtgacaattttcgcgcggttttaggcggatgttgtagtaaatttgggcgtaaccgagtaagatttggccattttcgcgggaaaactgaataagaggaagtgaaatctgaataattttgtgttactcatagcgcgtaataatttgctccggtgcccgtcagtgggcagagcgcacatcgcccacagtccccgagaagttggggggaggggtcggcaattgaaccggtgcctagagaaggtggcgcggggtaaactgggaaagtgatgtcgtgtactggctccgcctttttcccgagggtgggggagaaccgtatataagtgcagtagtcgccgtgaacgttctttttcgcaacgggtttgccgccagaacacaggtaagtgccgtgtgtggttcccgcgggcctggcctctttacgggttatggcccttgcgtgccttgaattacttccacgcccctggctgcagtacgtgattcttgatcccgagcttcgggttggaagtgggtgggagagttcgaggccttgcgcttaaggagccccttcgcctcgtgcttgagttgaggcttggcctgggcgctggggccgccgcgtgcgaatctggtggcaccttcgcgcctgtctcgctgctttcgataagtctctagccatttaaaatttttgatgacctgctgcgacgctttttttctggcaagatagtcttgtaaatgcgggccaagatctgcacactggtatttcggtttttggggccgcgggcggcgacggggcccgtgcgtcccagcgcacatgttcggcgaggcggggcctgcgagcgcggccaccgagaatcggacgggggtagtctcaagctggccggcctgctctggtgcctggcctcgcgccgccgtgtatcgccccgccctgggcggcaaggctggcccggtcggcaccagttgcgtgagcggaaagatggccgcttcccggccctgctgcagggagctcaaaatggaggacgcggcgctcgggagagcgggcgggtgagtcacccacacaaaggaaaagggcctttccgtcctcagccgtcgcttcatgtgactccacggagtaccgggcgccgtccaggcacctcgattagttctcgagcttttggagtacgtcgtctttaggttggggggaggggttttatgcgatggagtttccccatactgagtgggtggagactgaagttaggccagcttggcacttgatgtaattctccttggaatttgccctttttgagtttggatcttggttcattctcaagcctcagacagtggttcaaagtttttttcttccatttaaggtgtcgtgaaaactaccccaagctggccaccatgactacgtccggcgttccatttggcatgacactacgaccaacacgatctcggttgtctcggcgcactccgtacagtagggatcgtctacctccttttgagacagaaacccgcgctaccatactggaggatcatccgctgctgcccgaatgtaacactttgacaatgcacaacgtgagttacgtgcgaggtcttccctgcagtgtgggatttacgctgattcaggaatgggttgttccctgggatatggttctaacgcgggaggagcttgtaatcctgaggaagtgtatgcacgtgtgcctgtgttgtgccaacattgatatcatgacgagcatgatgatccatggttacgagtcctgggctctccactgtcattgttccagtcccggttccctgcagtgtatagccggcgggcaggttttggccagctggtttaggatggtggtggatggcgccatgtttaatcagaggtttatatggtaccgggaggtggtgaattacaacatgccaaaagaggtaatgtttatgtccagcgtgtttatgaggggtcgccacttaatctacctgcgcttgtggtatgatggccacgtgggttctgtggtccccgccatgagctttggatacagcgccttgcactgtgggattttgaacaatattgtggtgctgtgctgcagttactgtgctgatttaagtgagatcagggtgcgctgctgtgcccggaggacaaggcgccttatgctgcgggcggtgcgaatcatcgctgaggagaccactgccatgttgtattcctgcaggacggagcggcggcggcagcagtttattcgcgcgctgctgcagcaccaccgccctatcctgatgcacgattatgactctacccccatgtagaagcttggggatcaattctctagagctcgctgatcagcctcgactgtgccttctagttgccagccatctgttgtttgcccctcccccgtgccttccttgaccctggaaggtgccactcccactgtcctttcctaataaaatgaggaaattgcatcgcattgtctgagtaggtgtcattctattctggggggtggggtggggcaggacagcaagggggaggattgggaagacaatagcaggcatgctggggatgcggtgggctctatggcttctgaggctgtaatagtaatcaattacggggtcattagttcatagcccatatatggagttccgcgttacataacttacggtaaatggcccgcctggctgaccgcccaacgacccccgcccattgacgtcaataatgacgtatgttcccatagtaacgccaatagggactttccattgacgtcaatgggtggagtatttacggtaaactgcccacttggcagtacatcaagtgtatcatatgccaagtacgccccctattgacgtcaatgacggtaaatggcccgcctggcattatgcccagtacatgaccttatgggactttcctacttggcagtacatctacgtattagtcatcgctattaccatggtgatgcggttttggcagtacatcaatgggcgtggatagcggtttgactcacggggatttccaagtctccaccccattgacgtcaatgggagtttgttttggcaccaaaatcaacgggactttccaaaatgtcgtaacaactccgccccattgacgcaaatgggcggtaggcgtgtacggtgggaggtctatataagcagagctctccctatcagtgatagagatctccctatcagtgatagagatcgtcgacgagctcgtttagtgaaccgtcagatcgcctggagacgccatccacgctgttttgacctccatagaagacaccgggaccgatccagcctccgatttgccaccatgtttgtgttcctggtgctgctgccactggtgtccagccagtgtgtgaacctgaccaccaggacccaacttcctcctgcctacaccaactccttcaccaggggagtctactaccctgacaaggtgttcaggtcctctgtgctgcacagcacccaggacctgttcctgccattcttcagcaatgtgacctggttccatgccatccatgtgtctggcaccaatggcaccaagaggtttgacaaccctgtgctgccattcaatgatggagtctactttgccagcacagagaagagcaacatcatcaggggctggatttttggcaccaccctggacagcaagacccagtccctgctgattgtgaacaatgccaccaatgtggtgattaaggtgtgtgagttccagttctgtaatgacccattcctgggagtctactaccacaagaacaacaagtcctggatggagtctgagttcagggtctactcctctgccaacaactgtacctttgaatatgtgagccaaccattcctgatggacttggagggcaagcagggcaacttcaagaacctgagggagtttgtgttcaagaacattgatggctacttcaagatttacagcaaacacacaccaatcaacctggtgagggacctgccacagggcttctctgccttggaaccactggtggacctgccaattggcatcaacatcaccaggttccagaccctgctggctctgcacaggtcctacctgacacctggagactcctcctctggctggacagcaggagcagcagcctactatgtgggctacctccaaccaaggaccttcctgctgaaatacaatgagaatggcaccatcacagatgctgtggactgtgccctggacccactgtctgagaccaagtgtaccctgaaatccttcacagtggagaagggcatctaccagaccagcaacttcagggtccaaccaacagagagcattgtgaggtttccaaacatcaccaacctgtgtccatttggagaggtgttcaatgccaccaggtttgcctctgtctatgcctggaacaggaagaggattagcaactgtgtggctgactactctgtgctctacaactctgcctccttcagcaccttcaagtgttatggagtgagcccaaccaaactgaatgacctgtgtttcaccaatgtctatgctgactcctttgtgattaggggagatgaggtgagacagattgcccctggacaaacaggcaagattgctgactacaactacaaactgcctgatgacttcacaggctgtgtgattgcctggaacagcaacaacctggacagcaaggtgggaggcaactacaactacctctacagactgttcaggaagagcaacctgaaaccatttgagagggacatcagcacagagatttaccaggctggcagcacaccatgtaatggagtggagggcttcaactgttactttccactccaatcctatggcttccaaccaaccaatggagtgggctaccaaccatacagggtggtggtgctgtcctttgaactgctccatgcccctgccacagtgtgtggaccaaagaagagcaccaacctggtgaagaacaagtgtgtgaacttcaacttcaatggactgacaggcacaggagtgctgacagagagcaacaagaagttcctgccattccaacagtttggcagggacattgctgacaccacagatgctgtgagggacccacagaccttggagattctggacatcacaccatgttcctttggaggagtgtctgtgattacacctggcaccaacaccagcaaccaggtggctgtgctctaccaggatgtgaactgtactgaggtgcctgtggctatccatgctgaccaacttacaccaacctggagggtctacagcacaggcagcaatgtgttccagaccagggctggctgtctgattggagcagagcatgtgaacaactcctatgagtgtgacatcccaattggagcaggcatctgtgcctcctaccagacccagaccggtggcggtgggtcgaggtctgtggcaagccagagcatcattgcctacacaatgagtctgggagcagagaactctgtggcttacagcaacaacagcattgccatcccaaccaacttcaccatctctgtgaccacagagattctgcctgtgagtatgaccaagacctctgtggactgtacaatgtatatctgtggagacagcacagagtgtagcaacctgctgctccaatatggctccttctgtacccaacttaacagggctctgacaggcattgctgtggaacaggacaagaacacccaggaggtgtttgcccaggtgaagcagatttacaagacacctccaatcaaggactttggaggcttcaacttcagccagattctgcctgacccaagcaagccaagcaagaggtccttcattgaggacctgctgttcaacaaggtgaccctggctgatgctggcttcatcaagcaatatggagactgtctgggagacattgctgccagggacctgatttgtgcccagaagttcaatggactgacagtgctgcctccactgctgacagatgagatgattgcccaatacacctctgccctgctggctggcaccatcacctctggctggacctttggagcaggagcagccctccaaatcccatttgctatgcagatggcttacaggttcaatggcattggagtgacccagaatgtgctctatgagaaccagaaactgattgccaaccagttcaactctgccattggcaagattcaggactccctgtccagcacagcctctgccctgggcaaactccaagatgtggtgaaccagaatgcccaggctctgaacaccctggtgaagcaactttccagcaactttggagccatctcctctgtgctgaatgacatcctgagcagactggacaaggtggaggctgaggtccagattgacagactgattacaggcagactccaatccctccaaacctatgtgacccaacaacttatcagggctgctgagattagggcatctgccaacctggctgccaccaagatgagtgagtgtgtgctgggacaaagcaagagggtggacttctgtggcaagggctaccacctgatgagttttccacagtctgcccctcatggagtggtgttcctgcatgtgacctatgtgcctgcccaggagaagaacttcaccacagcccctgccatctgccatgatggcaaggctcactttccaagggagggagtgtttgtgagcaatggcacccactggtttgtgacccagaggaacttctatgaaccacagattatcaccacagacaacacctttgtgtctggcaactgtgatgtggtgattggcattgtgaacaacacagtctatgacccactccaacctgaactggactccttcaaggaggaactggacaaatacttcaagaaccacaccagccctgatgtggacctgggagacatctctggcatcaatgcctctgtggtgaacatccagaaggagattgacagactgaatgaggtggctaagaacctgaatgagtccctgattgacctccaagaactgggcaaatatgaacaatacatcaagtggccatgaaaattgatcataatcagccataccacatttgtagaggttttacttgctttaaaaaacctcccacacctccccctgaacctgaaacataaaatgaatgcaattgttgttgttaacttgtttattgcagcttataatggttacaaataaagcaatagcatcacaaatttcacaaataaagcatttttttcactgcattctagttgtggtttgtccaaactcatcaatgtatcttaacgcggatcaaattgggcgtggcttaagggtgggaaagaatatataaggtgggggtcttatgtagttttgtatctgttttgcagcagccgccgccgccatgagcaccaactcgtttgatggaagcattgtgagctcatatttgacaacgcgcatgcccccatgggccggggtgcgtcagaatgtgatgggctccagcattgatggtcgccccgtcctgcccgcaaactctactaccttgacctacgagaccgtgtctggaacgccgttggagactgcagcctccgccgccgcttcagccgctgcagccaccgcccgcgggattgtgactgactttgctttcctgagcccgcttgcaagcagtgcagcttcccgttcatccgcccgcgatgacaagttgacggctcttttggcacaattggattctttgacccgggaacttaatgtcgtttctcagcagctgttggatctgcgccagcaggtttctgccctgaaggcttcctcccctcccaatgcggtttaaaacataaataaaaaaccagactctgtttggatttggatcaagcaagtgtcttgctgtctttatttaggggttttgcgcgcgcggtaggcccgggaccagcggtctcggtcgttgagggtcctgtgtattttttccaggacgtggtaaaggtgactctggatgttcagatacatgggcataagcccgtctctggggtggaggtagcaccactgcagagcttcatgctgcggggtggtgttgtagatgatccagtcgtagcaggagcgctgggcgtggtgcctaaaaatgtctttcagtagcaagctgattgccaggggcaggcccttggtgtaagtgtttacaaagcggttaagctgggatgggtgcatacgtggggatatgagatgcatcttggactgtatttttaggttggctatgttcccagccatatccctccggggattcatgttgtgcagaaccaccagcacagtgtatccggtgcacttgggaaatttgtcatgtagcttagaaggaaatgcgtggaagaacttggagacgcccttgtgacctccaagattttccatgcattcgtccataatgatggcaatgggcccacgggcggcggcctgggcgaagatatttctgggatcactaacgtcatagttgtgttccaggatgagatcgtcataggccatttttacaaagcgcgggcggagggtgccagactgcggtataatggttccatccggcccaggggcgtagttaccctcacagatttgcatttcccacgctttgagttcagatggggggatcatgtctacctgcggggcgatgaagaaaacggtttccggggtaggggagatcagctgggaagaaagcaggttcctgagcagctgcgacttaccgcagccggtgggcccgtaaatcacacctattaccgggtgcaactggtagttaagagagctgcagctgccgtcatccctgagcaggggggccacttcgttaagcatgtccctgactcgcatgttttccctgaccaaatccgccagaaggcgctcgccgcccagcgatagcagttcttgcaaggaagcaaagtttttcaacggtttgagaccgtccgccgtaggcatgcttttgagcgtttgaccaagcagttccaggcggtcccacagctcggtcacctgctctacggcatctcgatccagcatatctcctcgtttcgcgggttggggcggctttcgctgtacggcagtagtcggtgctcgtccagacgggccagggtcatgtctttccacgggcgcagggtcctcgtcagcgtagtctgggtcacggtgaaggggtgcgctccgggctgcgcgctggccagggtgcgcttgaggctggtcctgctggtgctgaagcgctgccggtcttcgccctgcgcgtcggccaggtagcatttgaccatggtgtcatagtccagcccctccgcggcgtggcccttggcgcgcagcttgcccttggaggaggcgccgcacgaggggcagtgcagacttttgagggcgtagagcttgggcgcgagaaataccgattccggggagtaggcatccgcgccgcaggccccgcagacggtctcgcattccacgagccaggtgagctctggccgttcggggtcaaaaaccaggtttcccccatgctttttgatgcgtttcttacctctggtttccatgagccggtgtccacgctcggtgacgaaaaggctgtccgtgtccccgtatacagacttgagaggcctgtcctcgagcggtgttccgcggtcctcctcgtatagaaactcggaccactctgagacaaaggctcgcgtccaggccagcacgaaggaggctaagtgggaggggtagcggtcgttgtccactagggggtccactcgctccagggtgtgaagacacatgtcgccctcttcggcatcaaggaaggtgattggtttgtaggtgtaggccacgtgaccgggtgttcctgaaggggggctataaaagggggtgggggcgcgttcgtcctcactctcttccgcatcgctgtctgcgagggccagctgttggggtgagtactccctctgaaaagcgggcatgacttctgcgctaagattgtcagtttccaaaaacgaggaggatttgatattcacctggcccgcggtgatgcctttgagggtggccgcatccatctggtcagaaaagacaatctttttgttgtcaagcttggtggcaaacgacccgtagagggcgttggacagcaacttggcgatggagcgcagggtttggtttttgtcgcgatcggcgcgctccttggccgcgatgtttagctgcacgtattcgcgcgcaacgcaccgccattcgggaaagacggtggtgcgctcgtcgggcaccaggtgcacgcgccaaccgcggttgtgcagggtgacaaggtcaacgctggtggctacctctccgcgtaggcgctcgttggtccagcagaggcggccgcccttgcgcgagcagaatggcggtagggggtctagctgcgtctcgtccggggggtctgcgtccacggtaaagaccccgggcagcaggcgcgcgtcgaagtagtctatcttgcatccttgcaagtctagcgcctgctgccatgcgcgggcggcaagcgcgcgctcgtatgggttgagtgggggaccccatggcatggggtgggtgagcgcggaggcgtacatgccgcaaatgtcgtaaacgtagaggggctctctgagtattccaagatatgtagggtagcatcttccaccgcggatgctggcgcgcacgtaatcgtatagttcgtgcgagggagcgaggaggtcgggaccgaggttgctacgggcgggctgctctgctcggaagactatctgcctgaagatggcatgtgagttggatgatatggttggacgctggaagacgttgaagctggcgtctgtgagacctaccgcgtcacgcacgaaggaggcgtaggagtcgcgcagcttgttgaccagctcggcggtgacctgcacgtctagggcgcagtagtccagggtttccttgatgatgtcatacttatcctgtcccttttttttccacagctcgcggttgaggacaaactcttcgcggtctttccagtactcttggatcggaaacccgtcggcctccgaacggtaagagcctagcatgtagaactggttgacggcctggtaggcgcagcatcccttttctacgggtagcgcgtatgcctgcgcggccttccggagcgaggtgtgggtgagcgcaaaggtgtccctgaccatgactttgaggtactggtatttgaagtcagtgtcgtcgcatccgccctgctcccagagcaaaaagtccgtgcgctttttggaacgcggatttggcagggcgaaggtgacatcgttgaagagtatctttcccgcgcgaggcataaagttgcgtgtgatgcggaagggtcccggcacctcggaacggttgttaattacctgggcggcgagcacgatctcgtcaaagccgttgatgttgtggcccacaatgtaaagttccaagaagcgcgggatgcccttgatggaaggcaattttttaagttcctcgtaggtgagctcttcaggggagctgagcccgtgctctgaaagggcccagtctgcaagatgagggttggaagcgacgaatgagctccacaggtcacgggccattagcatttgcaggtggtcgcgaaaggtcctaaactggcgacctatggccattttttctggggtgatgcagtagaaggtaagcgggtcttgttcccagcggtcccatccaaggttcgcggctaggtctcgcgcggcagtcactagaggctcatctccgccgaacttcatgaccagcatgaagggcacgagctgcttcccaaaggcccccatccaagtataggtctctacatcgtaggtgacaaagagacgctcggtgcgaggatgcgagccgatcgggaagaactggatctcccgccaccaattggaggagtggctattgatgtggtgaaagtagaagtccctgcgacgggccgaacactcgtgctggcttttgtaaaaacgtgcgcagtactggcagcggtgcacgggctgtacatcctgcacgaggttgacctgacgaccgcgcacaaggaagcagagtgggaatttgagcccctcgcctggcgggtttggctggtggtcttctacttcggctgcttgtccttgaccgtctggctgctcgaggggagttacggtggatcggaccaccacgccgcgcgagcccaaagtccagatgtccgcgcgcggcggtcggagcttgatgacaacatcgcgcagatgggagctgtccatggtctggagctcccgcggcgtcaggtcaggcgggagctcctgcaggtttacctcgcatagacgggtcagggcgcgggctagatccaggtgatacctaatttccaggggctggttggtggcggcgtcgatggcttgcaagaggccgcatccccgcggcgcgactacggtaccgcgcggcgggcggtgggccgcgggggtgtccttggatgatgcatctaaaagcggtgacgcgggcgagcccccggaggtagggggggctccggacccgccgggagagggggcaggggcacgtcggcgccgcgcgcgggcaggagctggtgctgcgcgcgtaggttgctggcgaacgcgacgacgcggcggttgatctcctgaatctggcgcctctgcgtgaagacgacgggcccggtgagcttgaacctgaaagagagttcgacagaatcaatttcggtgtcgttgacggcggcctggcgcaaaatctcctgcacgtctcctgagttgtcttgataggcgatctcggccatgaactgctcgatctcttcctcctggagatctccgcgtccggctcgctccacggtggcggcgaggtcgttggaaatgcgggccatgagctgcgagaaggcgttgaggcctccctcgttccagacgcggctgtagaccacgcccccttcggcatcgcgggcgcgcatgaccacctgcgcgagattgagctccacgtgccgggcgaagacggcgtagtttcgcaggcgctgaaagaggtagttgagggtggtggcggtgtgttctgccacgaagaagtacataacccagcgtcgcaacgtggattcgttgatatcccccaaggcctcaaggcgctccatggcctcgtagaagtccacggcgaagttgaaaaactgggagttgcgcgccgacacggttaactcctcctccagaagacggatgagctcggcgacagtgtcgcgcacctcgcgctcaaaggctacaggggcctcttcttcttcttcaatctcctcttccataagggcctccccttcttcttcttctggcggcggtgggggaggggggacacggcggcgacgacggcgcaccgggaggcggtcgacaaagcgctcgatcatctccccgcggcgacggcgcatggtctcggtgacggcgcggccgttctcgcgggggcgcagttggaagacgccgcccgtcatgtcccggttatgggttggcggggggctgccatgcggcagggatacggcgctaacgatgcatctcaacaattgttgtgtaggtactccgccgccgagggacctgagcgagtccgcatcgaccggatcggaaaacctctcgagaaaggcgtctaaccagtcacagtcgcaaggtaggctgagcaccgtggcgggcggcagcgggcggcggtcggggttgtttctggcggaggtgctgctgatgatgtaattaaagtaggcggtcttgagacggcggatggtcgacagaagcaccatgtccttgggtccggcctgctgaatgcgcaggcggtcggccatgccccaggcttcgttttgacatcggcgcaggtctttgtagtagtcttgcatgagcctttctaccggcacttcttcttctccttcctcttgtcctgcatctcttgcatctatcgctgcggcggcggcggagtttggccgtaggtggcgccctcttcctcccatgcgtgtgaccccgaagcccctcatcggctgaagcagggctaggtcggcgacaacgcgctcggctaatatggcctgctgcacctgcgtgagggtagactggaagtcatccatgtccacaaagcggtggtatgcgcccgtgttgatggtgtaagtgcagttggccataacggaccagttaacggtctggtgacccggctgcgagagctcggtgtacctgagacgcgagtaagccctcgagtcaaatacgtagtcgttgcaagtccgcaccaggtactggtatcccaccaaaaagtgcggcggcggctggcggtagaggggccagcgtagggtggccggggctccgggggcgagatcttccaacataaggcgatgatatccgtagatgtacctggacatccaggtgatgccggcggcggtggtggaggcgcgcggaaagtcgcggacgcggttccagatgttgcgcagcggcaaaaagtgctccatggtcgggacgctctggccggtcaggcgcgcgcaatcgttgacgctctagcgtgcaaaaggagagcctgtaagcgggcactcttccgtggtctggtggataaattcgcaagggtatcatggcggacgaccggggttcgagccccgtatccggccgtccgccgtgatccatgcggttaccgcccgcgtgtcgaacccaggtgtgcgacgtcagacaacgggggagtgctccttttggcttccttccaggcgcggcggctgctgcgctagcttttttggccactggccgcgcgcagcgtaagcggttaggctggaaagcgaaagcattaagtggctcgctccctgtagccggagggttattttccaagggttgagtcgcgggacccccggttcgagtctcggaccggccggactgcggcgaacgggggtttgcctccccgtcatgcaagaccccgcttgcaaattcctccggaaacagggacgagccccttttttgcttttcccagatgcatccggtgctgcggcagatgcgcccccctcctcagcagcggcaagagcaagagcagcggcagacatgcagggcaccctcccctcctcctaccgcgtcaggaggggcgacatccgcggttgacgcggcagcagatggtgattacgaacccccgcggcgccgggcccggcactacctggacttggaggagggcgagggcctggcgcggctaggagcgccctctcctgagcggcacccaagggtgcagctgaagcgtgatacgcgtgaggcgtacgtgccgcggcagaacctgtttcgcgaccgcgagggagaggagcccgaggagatgcgggatcgaaagttccacgcagggcgcgagctgcggcatggcctgaatcgcgagcggttgctgcgcgaggaggactttgagcccgacgcgcgaaccgggattagtcccgcgcgcgcacacgtggcggccgccgacctggtaaccgcatacgagcagacggtgaaccaggagattaactttcaaaaaagctttaacaaccacgtgcgtacgcttgtggcgcgcgaggaggtggctataggactgatgcatctgtgggactttgtaagcgcgctggagcaaaacccaaatagcaagccgctcatggcgcagctgttccttatagtgcagcacagcagggacaacgaggcattcagggatgcgctgctaaacatagtagagcccgagggccgctggctgctcgatttgataaacatcctgcagagcatagtggtgcaggagcgcagcttgagcctggctgacaaggtggccgccatcaactattccatgcttagcctgggcaagttttacgcccgcaagatataccataccccttacgttcccatagacaaggaggtaaagatcgaggggttctacatgcgcatggcgctgaaggtgcttaccttgagcgacgacctgggcgtttatcgcaacgagcgcatccacaaggccgtgagcgtgagccggcggcgcgagctcagcgaccgcgagctgatgcacagcctgcaaagggccctggctggcacgggcagcggcgatagagaggccgagtcctactttgacgcgggcgctgacctgcgctgggccccaagccgacgcgccctggaggcagctggggccggacctgggctggcggtggcacccgcgcgcgctggcaacgtcggcggcgtggaggaatatgacgaggacgatgagtacgagccagaggacggcgagtactaagcggtgatgtttctgatcagatgatgcaagacgcaacggacccggcggtgcgggcggcgctgcagagccagccgtccggccttaactccacggacgactggcgccaggtcatggaccgcatcatgtcgctgactgcgcgcaatcctgacgcgttccggcagcagccgcaggccaaccggctctccgcaattctggaagcggtggtcccggcgcgcgcaaaccccacgcacgagaaggtgctggcgatcgtaaacgcgctggccgaaaacagggccatccggcccgacgaggccggcctggtctacgacgcgctgcttcagcgcgtggctcgttacaacagcggcaacgtgcagaccaacctggaccggctggtgggggatgtgcgcgaggccgtggcgcagcgtgagcgcgcgcagcagcagggcaacctgggctccatggttgcactaaacgccttcctgagtacacagcccgccaacgtgccgcggggacaggaggactacaccaactttgtgagcgcactgcggctaatggtgactgagacaccgcaaagtgaggtgtaccagtctgggccagactattttttccagaccagtagacaaggcctgcagaccgtaaacctgagccaggctttcaaaaacttgcaggggctgtggggggtgcgggctcccacaggcgaccgcgcgaccgtgtctagcttgctgacgcccaactcgcgcctgttgctgctgctaatagcgcccttcacggacagtggcagcgtgtcccgggacacatacctaggtcacttgctgacactgtaccgcgaggccataggtcaggcgcatgtggacgagcatactttccaggagattacaagtgtcagccgcgcgctggggcaggaggacacgggcagcctggaggcaaccctaaactacctgctgaccaaccggcggcagaagatcccctcgttgcacagtttaaacagcgaggaggagcgcattttgcgctacgtgcagcagagcgtgagccttaacctgatgcgcgacggggtaacgcccagcgtggcgctggacatgaccgcgcgcaacatggaaccgggcatgtatgcctcaaaccggccgtttatcaaccgcctaatggactacttgcatcgcgcggccgccgtgaaccccgagtatttcaccaatgccatcttgaacccgcactggctaccgccccctggtttctacaccgggggattcgaggtgcccgagggtaacgatggattcctctgggacgacatagacgacagcgtgttttccccgcaaccgcagaccctgctagagttgcaacagcgcgagcaggcagaggcggcgctgcgaaaggaaagcttccgcaggccaagcagcttgtccgatctaggcgctgcggccccgcggtcagatgctagtagcccatttccaagcttgatagggtctcttaccagcactcgcaccacccgcccgcgcctgctgggcgaggaggagtacctaaacaactcgctgctgcagccgcagcgcgaaaaaaacctgcctccggcatttcccaacaacgggatagagagcctagtggacaagatgagtagatggaagacgtacgcgcaggagcacagggacgtgccaggcccgcgcccgcccacccgtcgtcaaaggcacgaccgtcagcggggtctggtgtgggaggacgatgactcggcagacgacagcagcgtcctggatttgggagggagtggcaacccgtttgcgcaccttcgccccaggctggggagaatgttttaaaaaaaaaaaagcatgatgcaaaataaaaaactcaccaaggccatggcaccgagcgttggttttcttgtattccccttagtatgcggcgcgcggcgatgtatgaggaaggtcctcctccctcctacgagagtgtggtgagcgcggcgccagtggcggcggcgctgggttctcccttcgatgctcccctggacccgccgtttgtgcctccgcggtacctgcggcctaccggggggagaaacagcatccgttactctgagttggcacccctattcgacaccacccgtgtgtacctggtggacaacaagtcaacggatgtggcatccctgaactaccagaacgaccacagcaactttctgaccacggtcattcaaaacaatgactacagcccgggggaggcaagcacacagaccatcaatcttgacgaccggtcgcactggggcggcgacctgaaaaccatcctgcataccaacatgccaaatgtgaacgagttcatgtttaccaataagtttaaggcgcgggtgatggtgtcgcgcttgcctactaaggacaatcaggtggagctgaaatacgagtgggtggagttcacgctgcccgagggcaactactccgagaccatgaccatagaccttatgaacaacgcgatcgtggagcactacttgaaagtgggcagacagaacggggttctggaaagcgacatcggggtaaagtttgacacccgcaacttcagactggggtttgaccccgtcactggtcttgtcatgcctggggtatatacaaacgaagccttccatccagacatcattttgctgccaggatgcggggtggacttcacccacagccgcctgagcaacttgttgggcatccgcaagcggcaacccttccaggagggctttaggatcacctacgatgatctggagggtggtaacattcccgcactgttggatgtggacgcctaccaggcgagcttgaaagatgacaccgaacagggcgggggtggcgcaggcggcagcaacagcagtggcagcggcgcggaagagaactccaacgcggcagccgcggcaatgcagccggtggaggacatgaacgatcatgccattcgcggcgacacctttgccacacgggctgaggagaagcgcgctgaggccgaagcagcggccgaagctgccgcccccgctgcgcaacccgaggtcgagaagcctcagaagaaaccggtgatcaaacccctgacagaggacagcaagaaacgcagttacaacctaataagcaatgacagcaccttcacccagtaccgcagctggtaccttgcatacaactacggcgaccctcagaccggaatccgctcatggaccctgctttgcactcctgacgtaacctgcggctcggagcaggtctactggtcgttgccagacatgatgcaagaccccgtgaccttccgctccacgcgccagatcagcaactttccggtggtgggcgccgagctgttgcccgtgcactccaagagcttctacaacgaccaggccgtctactcccaactcatccgccagtttacctctctgacccacgtgttcaatcgctttcccgagaaccagattttggcgcgcccgccagcccccaccatcaccaccgtcagtgaaaacgttcctgctctcacagatcacgggacgctaccgctgcgcaacagcatcggaggagtccagcgagtgaccattactgacgccagacgccgcacctgcccctacgtttacaaggccctgggcatagtctcgccgcgcgtcctatcgagccgcactttttgagcaagcatgtccatccttatatcgcccagcaataacacaggctggggcctgcgcttcccaagcaagatgtttggcggggccaagaagcgctccgaccaacacccagtgcgcgtgcgcgggcactaccgcgcgccctggggcgcgcacaaacgcggccgcactgggcgcaccaccgtcgatgacgccatcgacgcggtggtggaggaggcgcgcaactacacgcccacgccgccaccagtgtccacagtggacgcggccattcagaccgtggtgcgcggagcccggcgctatgctaaaatgaagagacggcggaggcgcgtagcacgtcgccaccgccgccgacccggcactgccgcccaacgcgcggcggcggccctgcttaaccgcgcacgtcgcaccggccgacgggcggccatgcgggccgctcgaaggctggccgcgggtattgtcactgtgccccccaggtccaggcgacgagcggccgccgcagcagccgcggccattagtgctatgactcagggtcgcaggggcaacgtgtattgggtgcgcgactcggttagcggcctgcgcgtgcccgtgcgcacccgccccccgcgcaactagattgcaagaaaaaactacttagactcgtactgttgtatgtatccagcggcggcggcgcgcaacgaagctatgtccaagcgcaaaatcaaagaagagatgctccaggtcatcgcgccggagatctatggccccccgaagaaggaagagcaggattacaagccccgaaagctaaagcgggtcaaaaagaaaaagaaagatgatgatgatgaacttgacgacgaggtggaactgctgcacgctaccgcgcccaggcgacgggtacagtggaaaggtcgacgcgtaaaacgtgttttgcgacccggcaccaccgtagtctttacgcccggtgagcgctccacccgcacctacaagcgcgtgtatgatgaggtgtacggcgacgaggacctgcttgagcaggccaacgagcgcctcggggagtttgcctacggaaagcggcataaggacatgctggcgttgccgctggacgagggcaacccaacacctagcctaaagcccgtaacactgcagcaggtgctgcccgcgcttgcaccgtccgaagaaaagcgcggcctaaagcgcgagtctggtgacttggcacccaccgtgcagctgatggtacccaagcgccagcgactggaagatgtcttggaaaaaatgaccgtggaacctgggctggagcccgaggtccgcgtgcggccaatcaagcaggtggcgccgggactgggcgtgcagaccgtggacgttcagatacccactaccagtagcaccagtattgccaccgccacagagggcatggagacacaaacgtccccggttgcctcagcggtggcggatgccgcggtgcaggcggtcgctgcggccgcgtccaagacctctacggaggtgcaaacggacccgtggatgtttcgcgtttcagccccccggcgcccgcgccgttcgaggaagtacggcgccgccagcgcgctactgcccgaatatgccctacatccttccattgcgcctacccccggctatcgtggctacacctaccgccccagaagacgagcaactacccgacgccgaaccaccactggaacccgccgccgccgtcgccgtcgccagcccgtgctggccccgatttccgtgcgcagggtggctcgcgaaggaggcaggaccctggtgctgccaacagcgcgctaccaccccagcatcgtttaaaagccggtctttgtggttcttgcagatatggccctcacctgccgcctccgtttcccggtgccgggattccgaggaagaatgcaccgtaggaggggcatggccggccacggcctgacgggcggcatgcgtcgtgcgcaccaccggcggcggcgcgcgtcgcaccgtcgcatgcgcggcggtatcctgcccctccttattccactgatcgccgcggcgattggcgccgtgcccggaattgcatccgtggccttgcaggcgcagagacactgattaaaaacaagttgcatgtggaaaaatcaaaataaaaagtctggactctcacgctcgcttggtcctgtaactattttgtagaatggaagacatcaactttgcgtctctggccccgcgacacggctcgcgcccgttcatgggaaactggcaagatatcggcaccagcaatatgagcggtggcgccttcagctggggctcgctgtggagcggcattaaaaatttcggttccaccgttaagaactatggcagcaaggcctggaacagcagcacaggccagatgctgagggataagttgaaagagcaaaatttccaacaaaaggtggtagatggcctggcctctggcattagcggggtggtggacctggccaaccaggcagtgcaaaataagattaacagtaagcttgatccccgccctcccgtagaggagcctccaccggccgtggagacagtgtctccagaggggcgtggcgaaaagcgtccgcgccccgacagggaagaaactctggtgacgcaaatagacgagcctccctcgtacgaggaggcactaaagcaaggcctgcccaccacccgtcccatcgcgcccatggctaccggagtgctgggccagcacacacccgtaacgctggacctgcctccccccgccgacacccagcagaaacctgtgctgccaggcccgaccgccgttgttgtaacccgtcctagccgcgcgtccctgcgccgcgccgccagcggtccgcgatcgttgcggcccgtagccagtggcaactggcaaagcacactgaacagcatcgtgggtctgggggtgcaatccctgaagcgccgacgatgcttctgatagctaacgtgtcgtatgtgtgtcatgtatgcgtccatgtcgccgccagaggagctgctgagccgccgcgcgcccgctttccaagatggctaccccttcgatgatgccgcagtggtcttacatgcacatctcgggccaggacgcctcggagtacctgagccccgggctggtgcagtttgcccgcgccaccgagacgtacttcagcctgaataacaagtttagaaaccccacggtggcgcctacgcacgacgtgaccacagaccggtcccagcgtttgacgctgcggttcatccctgtggaccgtgaggatactgcgtactcgtacaaggcgcggttcaccctagctgtgggtgataaccgtgtgctggacatggcttccacgtactttgacatccgcggcgtgctggacaggggccctacttttaagccctactctggcactgcctacaacgccctggctcccaagggtgccccaaatccttgcgaatgggatgaagctgctactgctcttgaaataaacctagaagaagaggacgatgacaacgaagacgaagtagacgagcaagctgagcagcaaaaaactcacgtatttgggcaggcgccttattctggtataaatattacaaaggagggtattcaaataggtgtcgaaggtcaaacacctaaatatgccgataaaacatttcaacctgaacctcaaataggagaatctcagtggtacgaaacagaaattaatcatgcagctgggagagtcctaaaaaagactaccccaatgaaaccatgttacggttcatatgcaaaacccacaaatgaaaatggagggcaaggcattcttgtaaagcaacaaaatggaaagctagaaagtcaagtggaaatgcaatttttctcaactactgaggcagccgcaggcaatggtgataacttgactcctaaagtggtattgtacagtgaagatgtagatatagaaaccccagacactcatatttcttacatgcccactattaaggaaggtaactcacgagaactaatgggccaacaatctatgcccaacaggcctaattacattgcttttagggacaattttattggtctaatgtattacaacagcacgggtaatatgggtgttctggcgggccaagcatcgcagttgaatgctgttgtagatttgcaagacagaaacacagagctttcataccagcttttgcttgattccattggtgatagaaccaggtacttttctatgtggaatcaggctgttgacagctatgatccagatgttagaattattgaaaatcatggaactgaagatgaacttccaaattactgctttccactgggaggtgtgattaatacagagactcttaccaaggtaaaacctaaaacaggtcaggaaaatggatgggaaaaagatgctacagaattttcagataaaaatgaaataagagttggaaataattttgccatggaaatcaatctaaatgccaacctgtggagaaatttcctgtactccaacatagcgctgtatttgcccgacaagctaaagtacagtccttccaacgtaaaaatttctgataacccaaacacctacgactacatgaacaagcgagtggtggctcccgggctagtggactgctacattaaccttggagcacgctggtcccttgactatatggacaacgtcaacccatttaaccaccaccgcaatgctggcctgcgctaccgctcaatgttgctgggcaatggtcgctatgtgcccttccacatccaggtgcctcagaagttctttgccattaaaaacctccttctcctgccgggctcatacacctacgagtggaacttcaggaaggatgttaacatggttctgcagagctccctaggaaatgacctaagggttgacggagccagcattaagtttgatagcatttgcctttacgccaccttcttccccatggcccacaacaccgcctccacgcttgaggccatgcttagaaacgacaccaacgaccagtcctttaacgactatctctccgccgccaacatgctctaccctatacccgccaacgctaccaacgtgcccatatccatcccctcccgcaactgggcggctttccgcggctgggccttcacgcgccttaagactaaggaaaccccatcactgggctcgggctacgacccttattacacctactctggctctataccctacctagatggaaccttttacctcaaccacacctttaagaaggtggccattacctttgactcttctgtcagctggcctggcaatgaccgcctgcttacccccaacgagtttgaaattaagcgctcagttgacggggagggttacaacgttgcccagtgtaacatgaccaaagactggttcctggtacaaatgctagctaactataacattggctaccagggcttctatatcccagagagctacaaggaccgcatgtactccttctttagaaacttccagcccatgagccgtcaggtggtggatgatactaaatacaaggactaccaacaggtgggcatcctacaccaacacaacaactctggatttgttggctaccttgcccccaccatgcgcgaaggacaggcctaccctgctaacttcccctatccgcttataggcaagaccgcagttgacagcattacccagaaaaagtttctttgcgatcgcaccctttggcgcatcccattctccagtaactttatgtccatgggcgcactcacagacctgggccaaaaccttctctacgccaactccgcccacgcgctagacatgacttttgaggtggatcccatggacgagcccacccttctttatgttttgtttgaagtctttgacgtggtccgtgtgcaccagccgcaccgcggcgtcatcgaaaccgtgtacctgcgcacgcccttctcggccggcaacgccacaacataaagaagcaagcaacatcaacaacagctgccgccatgggctccagtgagcaggaactgaaagccattgtcaaagatcttggttgtgggccatattttttgggcacctatgacaagcgctttccaggctttgtttctccacacaagctcgcctgcgccatagtcaatacggccggtcgcgagactgggggcgtacactggatggcctttgcctggaacccgcactcaaaaacatgctacctctttgagccctttggcttttctgaccagcgactcaagcaggtttaccagtttgagtacgagtcactcctgcgccgtagcgccattgcttcttcccccgaccgctgtataacgctggaaaagtccacccaaagcgtacaggggcccaactcggccgcctgtggactattctgctgcatgtttctccacgcctttgccaactggccccaaactcccatggatcacaaccccaccatgaaccttattaccggggtacccaactccatgctcaacagtccccaggtacagcccaccctgcgtcgcaaccaggaacagctctacagcttcctggagcgccactcgccctacttccgcagccacagtgcgcagattaggagcgccacttctttttgtcacttgaaaaacatgtaaaaataatgtactagagacactttcaataaaggcaaatgcttttatttgtacactctcgggtgattatttacccccacccttgccgtctgcgccgtttaaaaatcaaaggggttctgccgcgcatcgctatgcgccactggcagggacacgttgcgatactggtgtttagtgctccacttaaactcaggcacaaccatccgcggcagctcggtgaagttttcactccacaggctgcgcaccatcaccaacgcgtttagcaggtcgggcgccgatatcttgaagtcgcagttggggcctccgccctgcgcgcgcgagttgcgatacacagggttgcagcactggaacactatcagcgccgggtggtgcacgctggccagcacgctcttgtcggagatcagatccgcgtccaggtcctccgcgttgctcagggcgaacggagtcaactttggtagctgccttcccaaaaagggcgcgtgcccaggctttgagttgcactcgcaccgtagtggcatcaaaaggtgaccgtgcccggtctgggcgttaggatacagcgcctgcataaaagccttgatctgcttaaaagccacctgagcctttgcgccttcagagaagaacatgccgcaagacttgccggaaaactgattggccggacaggccgcgtcgtgcacgcagcaccttgcgtcggtgttggagatctgcaccacatttcggccccaccggttcttcacgatcttggccttgctagactgctccttcagcgcgcgctgcccgttttcgctcgtcacatccatttcaatcacgtgctccttatttatcataatgcttccgtgtagacacttaagctcgccttcgatctcagcgcagcggtgcagccacaacgcgcagcccgtgggctcgtgatgcttgtaggtcacctctgcaaacgactgcaggtacgcctgcaggaatcgccccatcatcgtcacaaaggtcttgttgctggtgaaggtcagctgcaacccgcggtgctcctcgttcagccaggtcttgcatacggccgccagagcttccacttggtcaggcagtagtttgaagttcgcctttagatcgttatccacgtggtacttgtccatcagcgcgcgcgcagcctccatgcccttctcccacgcagacacgatcggcacactcagcgggttcatcaccgtaatttcactttccgcttcgctgggctcttcctcttcctcttgcgtccgcataccacgcgccactgggtcgtcttcattcagccgccgcactgtgcgcttacctcctttgccatgcttgattagcaccggtgggttgctgaaacccaccatttgtagcgccacatcttctctttcttcctcgctgtccacgattacctctggtgatggcgggcgctcgggcttgggagaagggcgcttctttttcttcttgggcgcaatggccaaatccgccgccgaggtcgatggccgcgggctgggtgtgcgcggcaccagcgcgtcttgtgatgagtcttcctcgtcctcggactcgatacgccgcctcatccgcttttttgggggcgcccggggaggcggcggcgacggggacggggacgacacgtcctccatggttgggggacgtcgcgccgcaccgcgtccgcgctcgggggtggtttcgcgctgctcctcttcccgactggccatttccttctcctataggcagaaaaagatcatggagtcagtcgagaagaaggacagcctaaccgccccctctgagttcgccaccaccgcctccaccgatgccgccaacgcgcctaccaccttccccgtcgaggcacccccgcttgaggaggaggaagtgattatcgagcaggacccaggttttgtaagcgaagacgacgaggaccgctcagtaccaacagaggataaaaagcaagaccaggacaacgcagaggcaaacgaggaacaagtcgggcggggggacgaaaggcatggcgactacctagatgtgggagacgacgtgctgttgaagcatctgcagcgccagtgcgccattatctgcgacgcgttgcaagagcgcagcgatgtgcccctcgccatagcggatgtcagccttgcctacgaacgccacctattctcaccgcgcgtaccccccaaacgccaagaaaacggcacatgcgagcccaacccgcgcctcaacttctaccccgtatttgccgtgccagaggtgcttgccacctatcacatctttttccaaaactgcaagatacccctatcctgccgtgccaaccgcagccgagcggacaagcagctggccttgcggcagggcgctgtcatacctgatatcgcctcgctcaacgaagtgccaaaaatctttgagggtcttggacgcgacgagaagcgcgcggcaaacgctctgcaacaggaaaacagcgaaaatgaaagtcactctggagtgttggtggaactcgagggtgacaacgcgcgcctagccgtactaaaacgcagcatcgaggtcacccactttgcctacccggcacttaacctaccccccaaggtcatgagcacagtcatgagtgagctgatcgtgcgccgtgcgcagcccctggagagggatgcaaatttgcaagaacaaacagaggagggcctacccgcagttggcgacgagcagctagcgcgctggcttcaaacgcgcgagcctgccgacttggaggagcgacgcaaactaatgatggccgcagtgctcgttaccgtggagcttgagtgcatgcagcggttctttgctgacccggagatgcagcgcaagctagaggaaacattgcactacacctttcgacagggctacgtacgccaggcctgcaagatctccaacgtggagctctgcaacctggtctcctaccttggaattttgcacgaaaaccgccttgggcaaaacgtgcttcattccacgctcaagggcgaggcgcgccgcgactacgtccgcgactgcgtttacttatttctatgctacacctggcagacggccatgggcgtttggcagcagtgcttggaggagtgcaacctcaaggagctgcagaaactgctaaagcaaaacttgaaggacctatggacggccttcaacgagcgctccgtggccgcgcacctggcggacatcattttccccgaacgcctgcttaaaaccctgcaacagggtctgccagacttcaccagtcaaagcatgttgcagaactttaggaactttatcctagagcgctcaggaatcttgcccgccacctgctgtgcacttcctagcgactttgtgcccattaagtaccgcgaatgccctccgccgctttggggccactgctaccttctgcagctagccaactaccttgcctaccactctgacataatggaagacgtgagcggtgacggtctactggagtgtcactgtcgctgcaacctatgcaccccgcaccgctccctggtttgcaattcgcagctgcttaacgaaagtcaaattatcggtacctttgagctgcagggtccctcgcctgacgaaaagtccgcggctccggggttgaaactcactccggggctgtggacgtcggcttaccttcgcaaatttgtacctgaggactaccacgcccacgagattaggttctacgaagaccaatcccgcccgcctaatgcggagcttaccgcctgcgtcattacccagggccacattcttggccaattgcaagccatcaacaaagcccgccaagagtttctgctacgaaagggacggggggtttacttggacccccagtccggcgaggagctcaacccaatccccccgccgccgcagccctatcagcagcagccgcgggcccttgcttcccaggatggcacccaaaaagaagctgcagctgccgccgccacccacggacgaggaggaatactgggacagtcaggcagaggaggttttggacgaggaggaggaggacatgatggaagactgggagagcctagacgaggaagcttccgaggtcgaagaggtgtcagacgaaacaccgtcaccctcggtcgcattcccctcgccggcgccccagaaatcggcaaccggttccagcatggctacaacctccgctcctcaggcgccgccggcactgcccgttcgccgacccaaccgtagatgggacaccactggaaccagggccggtaagtccaagcagccgccgccgttagcccaagagcaacaacagcgccaaggctaccgctcatggcgcgggcacaagaacgccatagttgcttgcttgcaagactgtgggggcaacatctccttcgcccgccgctttcttctctaccatcacggcgtggccttcccccgtaacatcctgcattactaccgtcatctctacagcccatactgcaccggcggcagcggcagcaacagcagcggccacacagaagcaaaggcgaccggatagcaagactctgacaaagcccaagaaatccacagcggcggcagcagcaggaggaggagcgctgcgtctggcgcccaacgaacccgtatcgacccgcgagcttagaaacaggatttttcccactctgtatgctatatttcaacagagcaggggccaagaacaagagctgaaaataaaaaacaggtctctgcgatccctcacccgcagctgcctgtatcacaaaagcgaagatcagcttcggcgcacgctggaagacgcggaggctctcttcagtaaatactgcgcgctgactcttaaggactagtttcgcgccctttctcaaatttaagcgcgaaaactacgtcatctccagcggccacacccggcgccagcacctgttgtcagcgccattatgagcaaggaaattcccacgccctacatgtggagttaccagccacaaatgggacttgcggctggagctgcccaagactactcaacccgaataaactacatgagcgcgggaccccacatgatatcccgggtcaacggaatacgcgcccaccgaaaccgaattctcctggaacaggcggctattaccaccacacctcgtaataaccttaatccccgtagttggcccgctgccctggtgtaccaggaaagtcccgctcccaccactgtggtacttcccagagacgcccaggccgaagttcagatgactaactcaggggcgcagcttgcgggcggctttcgtcacagggtgcggtcgcccgggcagggtataactcacctgacaatcagagggcgaggtattcagctcaacgacgagtcggtgagctcctcgcttggtctccgtccggacgggacatttcagatcggcggcgccggccgctcttcattcacgcctcgtcaggcaatcctaactctgcagacctcgtcctctgagccgcgctctggaggcattggaactctgcaatttattgaggagtttgtgccatcggtctactttaaccccttctcgggacctcccggccactatccggatcaatttattcctaactttgacgcggtaaaggactcggcggacggctacgactgaatgttaagtggagaggcagagcaactgcgcctgaaacacctggtccactgtcgccgccacaagtgctttgcccgcgactccggtgagttttgctactttgaattgcccgaggatcatatcgagggcccggcgcacggcgtccggcttaccgcccagggagagcttgcccgtagcctgattcgggagtttacccagcgccccctgctagttgagcgggacaggggaccctgtgttctcactgtgatttgcaactgtcctaaccctggattacatcaagatcctctagttaatgtcaggtcgcctaagtcgattaactagagtacccggggatcttattccctttaactaataaaaaaaaataataaagcatcacttacttaaaatcagttagcaaatttctgtccagtttattcagcagcacctccttgccctcctcccagctctggtattgcagcttcctcctggctgcaaactttctccacaatctaaatggaatgtcagtttcctcctgttcctgtccatccgcacccactatcttcatgttgttgcagatgaagcgcgcaagaccgtctgaagataccttcaaccccgtgtatccatatgacacggaaaccggtcctccaactgtgccttttcttactcctccctttgtatcccccaatgggtttcaagagagtccccctggggtactctctttgcgcctatccgaacctctagttacctccaatggcatgcttgcgctcaaaatgggcaacggcctctctctggacgaggccggcaaccttacctcccaaaatgtaaccactgtgagcccacctctcaaaaaaaccaagtcaaacataaacctggaaatatctgcacccctcacagttacctcagaagccctaactgtggctgccgccgcacctctaatggtcgcgggcaacacactcaccatgcaatcacaggccccgctaaccgtgcacgactccaaacttagcattgccacccaaggacccctcacagtgtcagaaggaaagctagccctgcaaacatcaggccccctcaccaccaccgatagcagtacccttactatcactgcctcaccccctctaactactgccactggtagcttgggcattgacttgaaagagcccatttatacacaaaatggaaaactaggactaaagtacggggctcctttgcatgtaacagacgacctaaacactttgaccgtagcaactggtccaggtgtgactattaataatacttccttgcaaactaaagttactggagccttgggttttgattcacaaggcaatatgcaacttaatgtagcaggaggactaaggattgattctcaaaacagacgccttatacttgatgttagttatccgtttgatgctcaaaaccaactaaatctaagactaggacagggccctctttttataaactcagcccacaacttggatattaactacaacaaaggcctttacttgtttacagcttcaaacaattccaaaaagcttgaggttaacctaagcactgccaaggggttgatgtttgacgctacagccatagccattaatgcaggagatgggcttgaatttggttcacctaatgcaccaaacacaaatcccctcaaaacaaaaattggccatggcctagaatttgattcaaacaaggctatggttcctaaactaggaactggccttagttttgacagcacaggtgccattacagtaggaaacaaaaataatgataagctaactttgtggaccggaataaaccctccacctaactgtcaaattgtggaaaacactaatacaaatgatggcaaacttactttagtattagtaaaaaatggagggcttgttaatggctacgtgtctctagttggtgtatcagacactgtgaaccaaatgttcacacaaaagacagcaaacatccaattaagattatattttgactcttctggaaatctattaactgaggaatcagacttaaaaattccacttaaaaataaatcttctacagcgaccagtgaaactgtagccagcagcaaagcctttatgccaagtactacagcttatcccttcaacaccactactagggatagtgaaaactacattcatggaatatgttactacatgactagttatgatagaagtctatttcccttgaacatttctataatgctaaacagccgtatgatttcttccaatgttgcctatgccatacaatttgaatggaatctaaatgcaagtgaatctccagaaagcaacatagctacgctgaccacatccccctttttcttttcttacattacagaagacgacaactaaagaatcgtttgtgttatgtttcaacgtgtttatttttcaattgcagaaaatttcaagtcatttttcattcagtagtatagccccaccaccacatagcttatacagatcaccgtaccttaatcaaactcacagaaccctagtattcaacctgccacctccctcccaacacacagagtacacagtcctttctccccggctggccttaaaaagcatcatatcatgggtaacagacatattcttaggtgttatattccacacggtttcctgtcgagccaaacgctcatcagtgatattaataaactccccgggcagctcacttaagttcatgtcgctgtccagctgctgagccacaggctgctgtccaacttgcggttgcttaacgggcggcgaaggagaagtccacgcctacatgggggtagagtcataatcgtgcatcaggatagggcggtggtgctgcagcagcgcgcgaataaactgctgccgccgccgctccgtcctgcaggaatacaacatggcagtggtctcctcagcgatgattcgcaccgcccgcagcataaggcgccttgtcctccgggcacagcagcgcaccctgatctcacttaaatcagcacagtaactgcagcacagcaccacaatattgttcaaaatcccacagtgcaaggcgctgtatccaaagctcatggcggggaccacagaacccacgtggccatcataccacaagcgcaggtagattaagtggcgacccctcataaacacgctggacataaacattacctcttttggcatgttgtaattcaccacctcccctctgattaaacatggcgccatccaccaccatcctaaaccagctggccaaaacctgcccgccggctatacactgcagggaaccgggactggaacaatgacagtggagagcccaggactcgtaaccatggatcatcatgctcgtcatgatatcaatgttggcacaacacaggcacacgtgcatacacttcctcaggattacaagctcctcccgcgttagaaccatatcccagggaacaacccattcctgaatcagcgtaaatcccacactgcagggaagacctcgcacgtaactcacgttgtgcattgtcaaagtgttacattcgggcagcagcggatgatcctccagtatggtagcgcgggtttctgtctcaaaaggaggtagacgatccctactgtacggagtgcgccgagacaaccgagatcgtgttggtcgtagtgtcatgccaaatggaacgccggacgtagtcatatttcctgaagcaaaaccaggtgcgggcgtgacaaacagatctgcgtctccggtctcgccgcttagatcgctctgtgtagtagttgtagtatatccactctctcaaagcatccaggcgccccctggcttcgggttctatgtaaactccttcatgcgccgctgccctgataacatccaccaccgcagaataagccacacccagccaacctacacattcgttctgcgagtcacacacgggaggagcgggaagagctggaagaaccatgtttttttttttattccaaaagattatccaaaacctcaaaatgaagatctattaagtgaacgcgctcccctccggtggcgtggtcaaactctacagccaaagaacagataatggcatttgtaagatgttgcacaatggcttccaaaaggcaaacggccctcacgtccaagtggacgtaaaggctaaacccttcagggtgaatctcctctataaacattccagcaccttcaaccatgcccaaataattctcatctcgccaccttctcaatatatctctaagcaaatcccgaatattaagtccggccattgtaaaaatctgctccagagcgccctccaccttcagcctcaagcagcgaatcatgattgcaaaaattcaggttcctcacagacctgtataagattcaaaagcggaacattaacaaaaataccgcgatcccgtaggtcccttcgcagggccagctgaacataatcgtgcaggtctgcacggaccagcgcggccacttccccgccaggaaccatgacaaaagaacccacactgattatgacacgcatactcggagctatgctaaccagcgtagccccgatgtaagcttgttgcatgggcggcgatataaaatgcaaggtgctgctcaaaaaatcaggcaaagcctcgcgcaaaaaagaaagcacatcgtagtcatgctcatgcagataaaggcaggtaagctccggaaccaccacagaaaaagacaccatttttctctcaaacatgtctgcgggtttctgcataaacacaaaataaaataacaaaaaaacatttaaacattagaagcctgtcttacaacaggaaaaacaacccttataagcataagacggactacggccatgccggcgtgaccgtaaaaaaactggtcaccgtgattaaaaagcaccaccgacagctcctcggtcatgtccggagtcataatgtaagactcggtaaacacatcaggttgattcacatcggtcagtgctaaaaagcgaccgaaatagcccgggggaatacatacccgcaggcgtagagacaacattacagcccccataggaggtataacaaaattaataggagagaaaaacacataaacacctgaaaaaccctcctgcctaggcaaaatagcaccctcccgctccagaacaacatacagcgcttccacagcggcagccataacagtcagccttaccagtaaaaaagaaaacctattaaaaaaacaccactcgacacggcaccagctcaatcagtcacagtgtaaaaaagggccaagtgcagagcgagtatatataggactaaaaaatgacgtaacggttaaagtccacaaaaaacacccagaaaaccgcacgcgaacctacgcccagaaacgaaagccaaaaaacccacaacttcctcaaatcgtcacttccgttttcccacgttacgtcacttcccattttaagaaaactacaattcccaacacatacaagttactccgccctaaaacctacgtcacccgccccgttcccacgccccgcgccacgtcacaaactccaccccctcattatcatattggcttcaatccaaaataaggtatattattgatgatg

SEQ ID NO: 9 - DNA, 37105 bp, Artificial Sequence
  Adk35R2-E4orf6/Spike-E4dl355(E4re#4)
ttaattaacatcatcaataatataccttattttggattgaagccaatatgataatgagggggtggagtttgtgacgtggcgcggggcgtgggaacggggcgggtgacgtagtagtgtggcggaagtgtgatgttgcaagtgtggcggaacacatgtaagcgacggatgtggcaaaagtgacgtttttggtgtgcgccggtgtacacaggaagtgacaattttcgcgcggttttaggcggatgttgtagtaaatttgggcgtaaccgagtaagatttggccattttcgcgggaaaactgaataagaggaagtgaaatctgaataattttgtgttactcatagcgcgtaataatttgatccgcgttaagatacattgatgagtttggacaaaccacaactagaatgcagtgaaaaaaatgctttatttgtgaaatttgtgatgctattgctttatttgtaaccattataagctgcaataaacaagttaacaacaacaattgcattcattttatgtttcaggttcagggggaggtgtgggaggttttttaaagcaagtaaaacctctacaaatgtggtatggctgattatgatcaattttcatggccacttgatgtattgttcatatttgcccagttcttggaggtcaatcagggactcattcaggttcttagccacctcattcagtctgtcaatctccttctggatgttcaccacagaggcattgatgccagagatgtctcccaggtccacatcagggctggtgtggttcttgaagtatttgtccagttcctccttgaaggagtccagttcaggttggagtgggtcatagactgtgttgttcacaatgccaatcaccacatcacagttgccagacacaaaggtgttgtctgtggtgataatctgtggttcatagaagttcctctgggtcacaaaccagtgggtgccattgctcacaaacactccctcccttggaaagtgagccttgccatcatggcagatggcaggggctgtggtgaagttcttctcctgggcaggcacataggtcacatgcaggaacaccactccatgaggggcagactgtggaaaactcatcaggtggtagcccttgccacagaagtccaccctcttgctttgtcccagcacacactcactcatcttggtggcagccaggttggcagatgccctaatctcagcagccctgataagttgttgggtcacataggtttggagggattggagtctgcctgtaatcagtctgtcaatctggacctcagcctccaccttgtccagtctgctcaggatgtcattcagcacagaggagatggctccaaagttgctggaaagttgcttcaccagggtgttcagagcctgggcattctggttcaccacatcttggagtttgcccagggcagaggctgtgctggacagggagtcctgaatcttgccaatggcagagttgaactggttggcaatcagtttctggttctcatagagcacattctgggtcactccaatgccattgaacctgtaagccatctgcatagcaaatgggatttggagggctgctcctgctccaaaggtccagccagaggtgatggtgccagccagcagggcagaggtgtattgggcaatcatctcatctgtcagcagtggaggcagcactgtcagtccattgaacttctgggcacaaatcaggtccctggcagcaatgtctcccagacagtctccatattgcttgatgaagccagcatcagccagggtcaccttgttgaacagcaggtcctcaatgaaggacctcttgcttggcttgcttgggtcaggcagaatctggctgaagttgaagcctccaaagtccttgattggaggtgtcttgtaaatctgcttcacctgggcaaacacctcctgggtgttcttgtcctgttccacagcaatgcctgtcagagccctgttaagttgggtacagaaggagccatattggagcagcaggttgctacactctgtgctgtctccacagatatacattgtacagtccacagaggtcttggtcatactcacaggcagaatctctgtggtcacagagatggtgaagttggttgggatggcaatgctgttgttgctgtaagccacagagttctctgctcccagactcattgtgtaggcaatgatgctctggcttgccacagacctcgacccaccgccaccggtctgggtctggtaggaggcacagatgcctgctccaattgggatgtcacactcataggagttgttcacatgctctgctccaatcagacagccagccctggtctggaacacattgctgcctgtgctgtagaccctccaggttggtgtaagttggtcagcatggatagccacaggcacctcagtacagttcacatcctggtagagcacagccacctggttgctggtgttggtgccaggtgtaatcacagacactcctccaaaggaacatggtgtgatgtccagaatctccaaggtctgtgggtccctcacagcatctgtggtgtcagcaatgtccctgccaaactgttggaatggcaggaacttcttgttgctctctgtcagcactcctgtgcctgtcagtccattgaagttgaagttcacacacttgttcttcaccaggttggtgctcttctttggtccacacactgtggcaggggcatggagcagttcaaaggacagcaccaccaccctgtatggttggtagcccactccattggttggttggaagccataggattggagtggaaagtaacagttgaagccctccactccattacatggtgtgctgccagcctggtaaatctctgtgctgatgtccctctcaaatggtttcaggttgctcttcctgaacagtctgtagaggtagttgtagttgcctcccaccttgctgtccaggttgttgctgttccaggcaatcacacagcctgtgaagtcatcaggcagtttgtagttgtagtcagcaatcttgcctgtttgtccaggggcaatctgtctcacctcatctcccctaatcacaaaggagtcagcatagacattggtgaaacacaggtcattcagtttggttgggctcactccataacacttgaaggtgctgaaggaggcagagttgtagagcacagagtagtcagccacacagttgctaatcctcttcctgttccaggcatagacagaggcaaacctggtggcattgaacacctctccaaatggacacaggttggtgatgtttggaaacctcacaatgctctctgttggttggaccctgaagttgctggtctggtagatgcccttctccactgtgaaggatttcagggtacacttggtctcagacagtgggtccagggcacagtccacagcatctgtgatggtgccattctcattgtatttcagcaggaaggtccttggttggaggtagcccacatagtaggctgctgctcctgctgtccagccagaggaggagtctccaggtgtcaggtaggacctgtgcagagccagcagggtctggaacctggtgatgttgatgccaattggcaggtccaccagtggttccaaggcagagaagccctgtggcaggtccctcaccaggttgattggtgtgtgtttgctgtaaatcttgaagtagccatcaatgttcttgaacacaaactccctcaggttcttgaagttgccctgcttgccctccaagtccatcaggaatggttggctcacatattcaaaggtacagttgttggcagaggagtagaccctgaactcagactccatccaggacttgttgttcttgtggtagtagactcccaggaatgggtcattacagaactggaactcacacaccttaatcaccacattggtggcattgttcacaatcagcagggactgggtcttgctgtccagggtggtgccaaaaatccagcccctgatgatgttgctcttctctgtgctggcaaagtagactccatcattgaatggcagcacagggttgtcaaacctcttggtgccattggtgccagacacatggatggcatggaaccaggtcacattgctgaagaatggcaggaacaggtcctgggtgctgtgcagcacagaggacctgaacaccttgtcagggtagtagactcccctggtgaaggagttggtgtaggcaggaggaagttgggtcctggtggtcaggttcacacactggctggacaccagtggcagcagcaccaggaacacaaacatggtggcaaatcggaggctggatcggtcccggtgtcttctatggaggtcaaaacagcgtggatggcgtctccaggcgatctgacggttcactaaacgagctcgtcgacgatctctatcactgatagggagatctctatcactgatagggagagctctgcttatatagacctcccaccgtacacgcctaccgcccatttgcgtcaatggggcggagttgttacgacattttggaaagtcccgttgattttggtgccaaaacaaactcccattgacgtcaatggggtggagacttggaaatccccgtgagtcaaaccgctatccacgcccattgatgtactgccaaaaccgcatcaccatggtaatagcgatgactaatacgtagatgtactgccaagtaggaaagtcccataaggtcatgtactgggcataatgccaggcgggccatttaccgtcattgacgtcaatagggggcgtacttggcatatgatacacttgatgtactgccaagtgggcagtttaccgtaaatactccacccattgacgtcaatggaaagtccctattggcgttactatgggaacatacgtcattattgacgtcaatgggcgggggtcgttgggcggtcagccaggcgggccatttaccgtaagttatgtaacgcggaactccatatatgggctatgaactaatgaccccgtaattgattactattacagcctcagaagccatagagcccaccgcatccccagcatgcctgctattgtcttcccaatcctcccccttgctgtcctgccccaccccaccccccagaatagaatgacacctactcagacaatgcgatgcaatttcctcattttattaggaaaggacagtgggagtggcaccttccagggtcaaggaaggcacgggggaggggcaaacaacagatggctggcaactagaaggcacagtcgaggctgatcagcgagctctagagaattgatccccaagcttctacatgggggtagagtcataatcgtgcatcaggatagggcggtggtgctgcagcagcgcgcgaataaactgctgccgccgccgctccgtcctgcaggaatacaacatggcagtggtctcctcagcgatgattcgcaccgcccgcagcataaggcgccttgtcctccgggcacagcagcgcaccctgatctcacttaaatcagcacagtaactgcagcacagcaccacaatattgttcaaaatcccacagtgcaaggcgctgtatccaaagctcatggcggggaccacagaacccacgtggccatcataccacaagcgcaggtagattaagtggcgacccctcataaacacgctggacataaacattacctcttttggcatgttgtaattcaccacctcccggtaccatataaacctctgattaaacatggcgccatccaccaccatcctaaaccagctggccaaaacctgcccgccggctatacactgcagggaaccgggactggaacaatgacagtggagagcccaggactcgtaaccatggatcatcatgctcgtcatgatatcaatgttggcacaacacaggcacacgtgcatacacttcctcaggattacaagctcctcccgcgttagaaccatatcccagggaacaacccattcctgaatcagcgtaaatcccacactgcagggaagacctcgcacgtaactcacgttgtgcattgtcaaagtgttacattcgggcagcagcggatgatcctccagtatggtagcgcgggtttctgtctcaaaaggaggtagacgatccctactgtacggagtgcgccgagacaaccgagatcgtgttggtcgtagtgtcatgccaaatggaacgccggacgtagtcatggtggccagcttggggtagttttcacgacaccttaaatggaagaaaaaaactttgaaccactgtctgaggcttgagaatgaaccaagatccaaactcaaaaagggcaaattccaaggagaattacatcaagtgccaagctggcctaacttcagtctccacccactcagtatggggaaactccatcgcataaaacccctccccccaacctaaagacgacgtactccaaaagctcgagaactaatcgaggtgcctggacggcgcccggtactccgtggagtcacatgaagcgacggctgaggacggaaaggcccttttcctttgtgtgggtgactcacccgcccgctctcccgagcgccgcgtcctccattttgagctccctgcagcagggccgggaagcggccatctttccgctcacgcaactggtgccgaccgggccagccttgccgcccagggcggggcgatacacggcggcgcgaggccaggcaccagagcaggccggccagcttgagactacccccgtccgattctcggtggccgcgctcgcaggccccgcctcgccgaacatgtgcgctgggacgcacgggccccgtcgccgcccgcggccccaaaaaccgaaataccagtgtgcagatcttggcccgcatttacaagactatcttgccagaaaaaaagcgtcgcagcaggtcatcaaaaattttaaatggctagagacttatcgaaagcagcgagacaggcgcgaaggtgccaccagattcgcacgcggcggccccagcgcccaggccaagcctcaactcaagcacgaggcgaaggggctccttaagcgcaaggcctcgaactctcccacccacttccaacccgaagctcgggatcaagaatcacgtactgcagccaggggcgtggaagtaattcaaggcacgcaagggccataacccgtaaagaggccaggcccgcgggaaccacacacggcacttacctgtgttctggcggcaaacccgttgcgaaaaagaacgttcacggcgactactgcacttatatacggttctcccccaccctcgggaaaaaggcggagccagtacacgacatcactttcccagtttaccccgcgccaccttctctaggcaccggttcaattgccgacccctccccccaacttctcggggactgtgggcgatgtgcgctctgcccactgacgggcaccggagcaaattgggcgtggcttaagggtgggaaagaatatataaggtgggggtcttatgtagttttgtatctgttttgcagcagccgccgccgccatgagcaccaactcgtttgatggaagcattgtgagctcatatttgacaacgcgcatgcccccatgggccggggtgcgtcagaatgtgatgggctccagcattgatggtcgccccgtcctgcccgcaaactctactaccttgacctacgagaccgtgtctggaacgccgttggagactgcagcctccgccgccgcttcagccgctgcagccaccgcccgcgggattgtgactgactttgctttcctgagcccgcttgcaagcagtgcagcttcccgttcatccgcccgcgatgacaagttgacggctcttttggcacaattggattctttgacccgggaacttaatgtcgtttctcagcagctgttggatctgcgccagcaggtttctgccctgaaggcttcctcccctcccaatgcggtttaaaacataaataaaaaaccagactctgtttggatttggatcaagcaagtgtcttgctgtctttatttaggggttttgcgcgcgcggtaggcccgggaccagcggtctcggtcgttgagggtcctgtgtattttttccaggacgtggtaaaggtgactctggatgttcagatacatgggcataagcccgtctctggggtggaggtagcaccactgcagagcttcatgctgcggggtggtgttgtagatgatccagtcgtagcaggagcgctgggcgtggtgcctaaaaatgtctttcagtagcaagctgattgccaggggcaggcccttggtgtaagtgtttacaaagcggttaagctgggatgggtgcatacgtggggatatgagatgcatcttggactgtatttttaggttggctatgttcccagccatatccctccggggattcatgttgtgcagaaccaccagcacagtgtatccggtgcacttgggaaatttgtcatgtagcttagaaggaaatgcgtggaagaacttggagacgcccttgtgacctccaagattttccatgcattcgtccataatgatggcaatgggcccacgggcggcggcctgggcgaagatatttctgggatcactaacgtcatagttgtgttccaggatgagatcgtcataggccatttttacaaagcgcgggcggagggtgccagactgcggtataatggttccatccggcccaggggcgtagttaccctcacagatttgcatttcccacgctttgagttcagatggggggatcatgtctacctgcggggcgatgaagaaaacggtttccggggtaggggagatcagctgggaagaaagcaggttcctgagcagctgcgacttaccgcagccggtgggcccgtaaatcacacctattaccgggtgcaactggtagttaagagagctgcagctgccgtcatccctgagcaggggggccacttcgttaagcatgtccctgactcgcatgttttccctgaccaaatccgccagaaggcgctcgccgcccagcgatagcagttcttgcaaggaagcaaagtttttcaacggtttgagaccgtccgccgtaggcatgcttttgagcgtttgaccaagcagttccaggcggtcccacagctcggtcacctgctctacggcatctcgatccagcatatctcctcgtttcgcgggttggggcggctttcgctgtacggcagtagtcggtgctcgtccagacgggccagggtcatgtctttccacgggcgcagggtcctcgtcagcgtagtctgggtcacggtgaaggggtgcgctccgggctgcgcgctggccagggtgcgcttgaggctggtcctgctggtgctgaagcgctgccggtcttcgccctgcgcgtcggccaggtagcatttgaccatggtgtcatagtccagcccctccgcggcgtggcccttggcgcgcagcttgcccttggaggaggcgccgcacgaggggcagtgcagacttttgagggcgtagagcttgggcgcgagaaataccgattccggggagtaggcatccgcgccgcaggccccgcagacggtctcgcattccacgagccaggtgagctctggccgttcggggtcaaaaaccaggtttcccccatgctttttgatgcgtttcttacctctggtttccatgagccggtgtccacgctcggtgacgaaaaggctgtccgtgtccccgtatacagacttgagaggcctgtcctcgagcggtgttccgcggtcctcctcgtatagaaactcggaccactctgagacaaaggctcgcgtccaggccagcacgaaggaggctaagtgggaggggtagcggtcgttgtccactagggggtccactcgctccagggtgtgaagacacatgtcgccctcttcggcatcaaggaaggtgattggtttgtaggtgtaggccacgtgaccgggtgttcctgaaggggggctataaaagggggtgggggcgcgttcgtcctcactctcttccgcatcgctgtctgcgagggccagctgttggggtgagtactccctctgaaaagcgggcatgacttctgcgctaagattgtcagtttccaaaaacgaggaggatttgatattcacctggcccgcggtgatgcctttgagggtggccgcatccatctggtcagaaaagacaatctttttgttgtcaagcttggtggcaaacgacccgtagagggcgttggacagcaacttggcgatggagcgcagggtttggtttttgtcgcgatcggcgcgctccttggccgcgatgtttagctgcacgtattcgcgcgcaacgcaccgccattcgggaaagacggtggtgcgctcgtcgggcaccaggtgcacgcgccaaccgcggttgtgcagggtgacaaggtcaacgctggtggctacctctccgcgtaggcgctcgttggtccagcagaggcggccgcccttgcgcgagcagaatggcggtagggggtctagctgcgtctcgtccggggggtctgcgtccacggtaaagaccccgggcagcaggcgcgcgtcgaagtagtctatcttgcatccttgcaagtctagcgcctgctgccatgcgcgggcggcaagcgcgcgctcgtatgggttgagtgggggaccccatggcatggggtgggtgagcgcggaggcgtacatgccgcaaatgtcgtaaacgtagaggggctctctgagtattccaagatatgtagggtagcatcttccaccgcggatgctggcgcgcacgtaatcgtatagttcgtgcgagggagcgaggaggtcgggaccgaggttgctacgggcgggctgctctgctcggaagactatctgcctgaagatggcatgtgagttggatgatatggttggacgctggaagacgttgaagctggcgtctgtgagacctaccgcgtcacgcacgaaggaggcgtaggagtcgcgcagcttgttgaccagctcggcggtgacctgcacgtctagggcgcagtagtccagggtttccttgatgatgtcatacttatcctgtcccttttttttccacagctcgcggttgaggacaaactcttcgcggtctttccagtactcttggatcggaaacccgtcggcctccgaacggtaagagcctagcatgtagaactggttgacggcctggtaggcgcagcatcccttttctacgggtagcgcgtatgcctgcgcggccttccggagcgaggtgtgggtgagcgcaaaggtgtccctgaccatgactttgaggtactggtatttgaagtcagtgtcgtcgcatccgccctgctcccagagcaaaaagtccgtgcgctttttggaacgcggatttggcagggcgaaggtgacatcgttgaagagtatctttcccgcgcgaggcataaagttgcgtgtgatgcggaagggtcccggcacctcggaacggttgttaattacctgggcggcgagcacgatctcgtcaaagccgttgatgttgtggcccacaatgtaaagttccaagaagcgcgggatgcccttgatggaaggcaattttttaagttcctcgtaggtgagctcttcaggggagctgagcccgtgctctgaaagggcccagtctgcaagatgagggttggaagcgacgaatgagctccacaggtcacgggccattagcatttgcaggtggtcgcgaaaggtcctaaactggcgacctatggccattttttctggggtgatgcagtagaaggtaagcgggtcttgttcccagcggtcccatccaaggttcgcggctaggtctcgcgcggcagtcactagaggctcatctccgccgaacttcatgaccagcatgaagggcacgagctgcttcccaaaggcccccatccaagtataggtctctacatcgtaggtgacaaagagacgctcggtgcgaggatgcgagccgatcgggaagaactggatctcccgccaccaattggaggagtggctattgatgtggtgaaagtagaagtccctgcgacgggccgaacactcgtgctggcttttgtaaaaacgtgcgcagtactggcagcggtgcacgggctgtacatcctgcacgaggttgacctgacgaccgcgcacaaggaagcagagtgggaatttgagcccctcgcctggcgggtttggctggtggtcttctacttcggctgcttgtccttgaccgtctggctgctcgaggggagttacggtggatcggaccaccacgccgcgcgagcccaaagtccagatgtccgcgcgcggcggtcggagcttgatgacaacatcgcgcagatgggagctgtccatggtctggagctcccgcggcgtcaggtcaggcgggagctcctgcaggtttacctcgcatagacgggtcagggcgcgggctagatccaggtgatacctaatttccaggggctggttggtggcggcgtcgatggcttgcaagaggccgcatccccgcggcgcgactacggtaccgcgcggcgggcggtgggccgcgggggtgtccttggatgatgcatctaaaagcggtgacgcgggcgagcccccggaggtagggggggctccggacccgccgggagagggggcaggggcacgtcggcgccgcgcgcgggcaggagctggtgctgcgcgcgtaggttgctggcgaacgcgacgacgcggcggttgatctcctgaatctggcgcctctgcgtgaagacgacgggcccggtgagcttgaacctgaaagagagttcgacagaatcaatttcggtgtcgttgacggcggcctggcgcaaaatctcctgcacgtctcctgagttgtcttgataggcgatctcggccatgaactgctcgatctcttcctcctggagatctccgcgtccggctcgctccacggtggcggcgaggtcgttggaaatgcgggccatgagctgcgagaaggcgttgaggcctccctcgttccagacgcggctgtagaccacgcccccttcggcatcgcgggcgcgcatgaccacctgcgcgagattgagctccacgtgccgggcgaagacggcgtagtttcgcaggcgctgaaagaggtagttgagggtggtggcggtgtgttctgccacgaagaagtacataacccagcgtcgcaacgtggattcgttgatatcccccaaggcctcaaggcgctccatggcctcgtagaagtccacggcgaagttgaaaaactgggagttgcgcgccgacacggttaactcctcctccagaagacggatgagctcggcgacagtgtcgcgcacctcgcgctcaaaggctacaggggcctcttcttcttcttcaatctcctcttccataagggcctccccttcttcttcttctggcggcggtgggggaggggggacacggcggcgacgacggcgcaccgggaggcggtcgacaaagcgctcgatcatctccccgcggcgacggcgcatggtctcggtgacggcgcggccgttctcgcgggggcgcagttggaagacgccgcccgtcatgtcccggttatgggttggcggggggctgccatgcggcagggatacggcgctaacgatgcatctcaacaattgttgtgtaggtactccgccgccgagggacctgagcgagtccgcatcgaccggatcggaaaacctctcgagaaaggcgtctaaccagtcacagtcgcaaggtaggctgagcaccgtggcgggcggcagcgggcggcggtcggggttgtttctggcggaggtgctgctgatgatgtaattaaagtaggcggtcttgagacggcggatggtcgacagaagcaccatgtccttgggtccggcctgctgaatgcgcaggcggtcggccatgccccaggcttcgttttgacatcggcgcaggtctttgtagtagtcttgcatgagcctttctaccggcacttcttcttctccttcctcttgtcctgcatctcttgcatctatcgctgcggcggcggcggagtttggccgtaggtggcgccctcttcctcccatgcgtgtgaccccgaagcccctcatcggctgaagcagggctaggtcggcgacaacgcgctcggctaatatggcctgctgcacctgcgtgagggtagactggaagtcatccatgtccacaaagcggtggtatgcgcccgtgttgatggtgtaagtgcagttggccataacggaccagttaacggtctggtgacccggctgcgagagctcggtgtacctgagacgcgagtaagccctcgagtcaaatacgtagtcgttgcaagtccgcaccaggtactggtatcccaccaaaaagtgcggcggcggctggcggtagaggggccagcgtagggtggccggggctccgggggcgagatcttccaacataaggcgatgatatccgtagatgtacctggacatccaggtgatgccggcggcggtggtggaggcgcgcggaaagtcgcggacgcggttccagatgttgcgcagcggcaaaaagtgctccatggtcgggacgctctggccggtcaggcgcgcgcaatcgttgacgctctagcgtgcaaaaggagagcctgtaagcgggcactcttccgtggtctggtggataaattcgcaagggtatcatggcggacgaccggggttcgagccccgtatccggccgtccgccgtgatccatgcggttaccgcccgcgtgtcgaacccaggtgtgcgacgtcagacaacgggggagtgctccttttggcttccttccaggcgcggcggctgctgcgctagcttttttggccactggccgcgcgcagcgtaagcggttaggctggaaagcgaaagcattaagtggctcgctccctgtagccggagggttattttccaagggttgagtcgcgggacccccggttcgagtctcggaccggccggactgcggcgaacgggggtttgcctccccgtcatgcaagaccccgcttgcaaattcctccggaaacagggacgagccccttttttgcttttcccagatgcatccggtgctgcggcagatgcgcccccctcctcagcagcggcaagagcaagagcagcggcagacatgcagggcaccctcccctcctcctaccgcgtcaggaggggcgacatccgcggttgacgcggcagcagatggtgattacgaacccccgcggcgccgggcccggcactacctggacttggaggagggcgagggcctggcgcggctaggagcgccctctcctgagcggcacccaagggtgcagctgaagcgtgatacgcgtgaggcgtacgtgccgcggcagaacctgtttcgcgaccgcgagggagaggagcccgaggagatgcgggatcgaaagttccacgcagggcgcgagctgcggcatggcctgaatcgcgagcggttgctgcgcgaggaggactttgagcccgacgcgcgaaccgggattagtcccgcgcgcgcacacgtggcggccgccgacctggtaaccgcatacgagcagacggtgaaccaggagattaactttcaaaaaagctttaacaaccacgtgcgtacgcttgtggcgcgcgaggaggtggctataggactgatgcatctgtgggactttgtaagcgcgctggagcaaaacccaaatagcaagccgctcatggcgcagctgttccttatagtgcagcacagcagggacaacgaggcattcagggatgcgctgctaaacatagtagagcccgagggccgctggctgctcgatttgataaacatcctgcagagcatagtggtgcaggagcgcagcttgagcctggctgacaaggtggccgccatcaactattccatgcttagcctgggcaagttttacgcccgcaagatataccataccccttacgttcccatagacaaggaggtaaagatcgaggggttctacatgcgcatggcgctgaaggtgcttaccttgagcgacgacctgggcgtttatcgcaacgagcgcatccacaaggccgtgagcgtgagccggcggcgcgagctcagcgaccgcgagctgatgcacagcctgcaaagggccctggctggcacgggcagcggcgatagagaggccgagtcctactttgacgcgggcgctgacctgcgctgggccccaagccgacgcgccctggaggcagctggggccggacctgggctggcggtggcacccgcgcgcgctggcaacgtcggcggcgtggaggaatatgacgaggacgatgagtacgagccagaggacggcgagtactaagcggtgatgtttctgatcagatgatgcaagacgcaacggacccggcggtgcgggcggcgctgcagagccagccgtccggccttaactccacggacgactggcgccaggtcatggaccgcatcatgtcgctgactgcgcgcaatcctgacgcgttccggcagcagccgcaggccaaccggctctccgcaattctggaagcggtggtcccggcgcgcgcaaaccccacgcacgagaaggtgctggcgatcgtaaacgcgctggccgaaaacagggccatccggcccgacgaggccggcctggtctacgacgcgctgcttcagcgcgtggctcgttacaacagcggcaacgtgcagaccaacctggaccggctggtgggggatgtgcgcgaggccgtggcgcagcgtgagcgcgcgcagcagcagggcaacctgggctccatggttgcactaaacgccttcctgagtacacagcccgccaacgtgccgcggggacaggaggactacaccaactttgtgagcgcactgcggctaatggtgactgagacaccgcaaagtgaggtgtaccagtctgggccagactattttttccagaccagtagacaaggcctgcagaccgtaaacctgagccaggctttcaaaaacttgcaggggctgtggggggtgcgggctcccacaggcgaccgcgcgaccgtgtctagcttgctgacgcccaactcgcgcctgttgctgctgctaatagcgcccttcacggacagtggcagcgtgtcccgggacacatacctaggtcacttgctgacactgtaccgcgaggccataggtcaggcgcatgtggacgagcatactttccaggagattacaagtgtcagccgcgcgctggggcaggaggacacgggcagcctggaggcaaccctaaactacctgctgaccaaccggcggcagaagatcccctcgttgcacagtttaaacagcgaggaggagcgcattttgcgctacgtgcagcagagcgtgagccttaacctgatgcgcgacggggtaacgcccagcgtggcgctggacatgaccgcgcgcaacatggaaccgggcatgtatgcctcaaaccggccgtttatcaaccgcctaatggactacttgcatcgcgcggccgccgtgaaccccgagtatttcaccaatgccatcttgaacccgcactggctaccgccccctggtttctacaccgggggattcgaggtgcccgagggtaacgatggattcctctgggacgacatagacgacagcgtgttttccccgcaaccgcagaccctgctagagttgcaacagcgcgagcaggcagaggcggcgctgcgaaaggaaagcttccgcaggccaagcagcttgtccgatctaggcgctgcggccccgcggtcagatgctagtagcccatttccaagcttgatagggtctcttaccagcactcgcaccacccgcccgcgcctgctgggcgaggaggagtacctaaacaactcgctgctgcagccgcagcgcgaaaaaaacctgcctccggcatttcccaacaacgggatagagagcctagtggacaagatgagtagatggaagacgtacgcgcaggagcacagggacgtgccaggcccgcgcccgcccacccgtcgtcaaaggcacgaccgtcagcggggtctggtgtgggaggacgatgactcggcagacgacagcagcgtcctggatttgggagggagtggcaacccgtttgcgcaccttcgccccaggctggggagaatgttttaaaaaaaaaaaagcatgatgcaaaataaaaaactcaccaaggccatggcaccgagcgttggttttcttgtattccccttagtatgcggcgcgcggcgatgtatgaggaaggtcctcctccctcctacgagagtgtggtgagcgcggcgccagtggcggcggcgctgggttctcccttcgatgctcccctggacccgccgtttgtgcctccgcggtacctgcggcctaccggggggagaaacagcatccgttactctgagttggcacccctattcgacaccacccgtgtgtacctggtggacaacaagtcaacggatgtggcatccctgaactaccagaacgaccacagcaactttctgaccacggtcattcaaaacaatgactacagcccgggggaggcaagcacacagaccatcaatcttgacgaccggtcgcactggggcggcgacctgaaaaccatcctgcataccaacatgccaaatgtgaacgagttcatgtttaccaataagtttaaggcgcgggtgatggtgtcgcgcttgcctactaaggacaatcaggtggagctgaaatacgagtgggtggagttcacgctgcccgagggcaactactccgagaccatgaccatagaccttatgaacaacgcgatcgtggagcactacttgaaagtgggcagacagaacggggttctggaaagcgacatcggggtaaagtttgacacccgcaacttcagactggggtttgaccccgtcactggtcttgtcatgcctggggtatatacaaacgaagccttccatccagacatcattttgctgccaggatgcggggtggacttcacccacagccgcctgagcaacttgttgggcatccgcaagcggcaacccttccaggagggctttaggatcacctacgatgatctggagggtggtaacattcccgcactgttggatgtggacgcctaccaggcgagcttgaaagatgacaccgaacagggcgggggtggcgcaggcggcagcaacagcagtggcagcggcgcggaagagaactccaacgcggcagccgcggcaatgcagccggtggaggacatgaacgatcatgccattcgcggcgacacctttgccacacgggctgaggagaagcgcgctgaggccgaagcagcggccgaagctgccgcccccgctgcgcaacccgaggtcgagaagcctcagaagaaaccggtgatcaaacccctgacagaggacagcaagaaacgcagttacaacctaataagcaatgacagcaccttcacccagtaccgcagctggtaccttgcatacaactacggcgaccctcagaccggaatccgctcatggaccctgctttgcactcctgacgtaacctgcggctcggagcaggtctactggtcgttgccagacatgatgcaagaccccgtgaccttccgctccacgcgccagatcagcaactttccggtggtgggcgccgagctgttgcccgtgcactccaagagcttctacaacgaccaggccgtctactcccaactcatccgccagtttacctctctgacccacgtgttcaatcgctttcccgagaaccagattttggcgcgcccgccagcccccaccatcaccaccgtcagtgaaaacgttcctgctctcacagatcacgggacgctaccgctgcgcaacagcatcggaggagtccagcgagtgaccattactgacgccagacgccgcacctgcccctacgtttacaaggccctgggcatagtctcgccgcgcgtcctatcgagccgcactttttgagcaagcatgtccatccttatatcgcccagcaataacacaggctggggcctgcgcttcccaagcaagatgtttggcggggccaagaagcgctccgaccaacacccagtgcgcgtgcgcgggcactaccgcgcgccctggggcgcgcacaaacgcggccgcactgggcgcaccaccgtcgatgacgccatcgacgcggtggtggaggaggcgcgcaactacacgcccacgccgccaccagtgtccacagtggacgcggccattcagaccgtggtgcgcggagcccggcgctatgctaaaatgaagagacggcggaggcgcgtagcacgtcgccaccgccgccgacccggcactgccgcccaacgcgcggcggcggccctgcttaaccgcgcacgtcgcaccggccgacgggcggccatgcgggccgctcgaaggctggccgcgggtattgtcactgtgccccccaggtccaggcgacgagcggccgccgcagcagccgcggccattagtgctatgactcagggtcgcaggggcaacgtgtattgggtgcgcgactcggttagcggcctgcgcgtgcccgtgcgcacccgccccccgcgcaactagattgcaagaaaaaactacttagactcgtactgttgtatgtatccagcggcggcggcgcgcaacgaagctatgtccaagcgcaaaatcaaagaagagatgctccaggtcatcgcgccggagatctatggccccccgaagaaggaagagcaggattacaagccccgaaagctaaagcgggtcaaaaagaaaaagaaagatgatgatgatgaacttgacgacgaggtggaactgctgcacgctaccgcgcccaggcgacgggtacagtggaaaggtcgacgcgtaaaacgtgttttgcgacccggcaccaccgtagtctttacgcccggtgagcgctccacccgcacctacaagcgcgtgtatgatgaggtgtacggcgacgaggacctgcttgagcaggccaacgagcgcctcggggagtttgcctacggaaagcggcataaggacatgctggcgttgccgctggacgagggcaacccaacacctagcctaaagcccgtaacactgcagcaggtgctgcccgcgcttgcaccgtccgaagaaaagcgcggcctaaagcgcgagtctggtgacttggcacccaccgtgcagctgatggtacccaagcgccagcgactggaagatgtcttggaaaaaatgaccgtggaacctgggctggagcccgaggtccgcgtgcggccaatcaagcaggtggcgccgggactgggcgtgcagaccgtggacgttcagatacccactaccagtagcaccagtattgccaccgccacagagggcatggagacacaaacgtccccggttgcctcagcggtggcggatgccgcggtgcaggcggtcgctgcggccgcgtccaagacctctacggaggtgcaaacggacccgtggatgtttcgcgtttcagccccccggcgcccgcgccgttcgaggaagtacggcgccgccagcgcgctactgcccgaatatgccctacatccttccattgcgcctacccccggctatcgtggctacacctaccgccccagaagacgagcaactacccgacgccgaaccaccactggaacccgccgccgccgtcgccgtcgccagcccgtgctggccccgatttccgtgcgcagggtggctcgcgaaggaggcaggaccctggtgctgccaacagcgcgctaccaccccagcatcgtttaaaagccggtctttgtggttcttgcagatatggccctcacctgccgcctccgtttcccggtgccgggattccgaggaagaatgcaccgtaggaggggcatggccggccacggcctgacgggcggcatgcgtcgtgcgcaccaccggcggcggcgcgcgtcgcaccgtcgcatgcgcggcggtatcctgcccctccttattccactgatcgccgcggcgattggcgccgtgcccggaattgcatccgtggccttgcaggcgcagagacactgattaaaaacaagttgcatgtggaaaaatcaaaataaaaagtctggactctcacgctcgcttggtcctgtaactattttgtagaatggaagacatcaactttgcgtctctggccccgcgacacggctcgcgcccgttcatgggaaactggcaagatatcggcaccagcaatatgagcggtggcgccttcagctggggctcgctgtggagcggcattaaaaatttcggttccaccgttaagaactatggcagcaaggcctggaacagcagcacaggccagatgctgagggataagttgaaagagcaaaatttccaacaaaaggtggtagatggcctggcctctggcattagcggggtggtggacctggccaaccaggcagtgcaaaataagattaacagtaagcttgatccccgccctcccgtagaggagcctccaccggccgtggagacagtgtctccagaggggcgtggcgaaaagcgtccgcgccccgacagggaagaaactctggtgacgcaaatagacgagcctccctcgtacgaggaggcactaaagcaaggcctgcccaccacccgtcccatcgcgcccatggctaccggagtgctgggccagcacacacccgtaacgctggacctgcctccccccgccgacacccagcagaaacctgtgctgccaggcccgaccgccgttgttgtaacccgtcctagccgcgcgtccctgcgccgcgccgccagcggtccgcgatcgttgcggcccgtagccagtggcaactggcaaagcacactgaacagcatcgtgggtctgggggtgcaatccctgaagcgccgacgatgcttctgatagctaacgtgtcgtatgtgtgtcatgtatgcgtccatgtcgccgccagaggagctgctgagccgccgcgcgcccgctttccaagatggctaccccttcgatgatgccgcagtggtcttacatgcacatctcgggccaggacgcctcggagtacctgagccccgggctggtgcagtttgcccgcgccaccgagacgtacttcagcctgaataacaagtttagaaaccccacggtggcgcctacgcacgacgtgaccacagaccggtcccagcgtttgacgctgcggttcatccctgtggaccgtgaggatactgcgtactcgtacaaggcgcggttcaccctagctgtgggtgataaccgtgtgctggacatggcttccacgtactttgacatccgcggcgtgctggacaggggccctacttttaagccctactctggcactgcctacaacgccctggctcccaagggtgccccaaatccttgcgaatgggatgaagctgctactgctcttgaaataaacctagaagaagaggacgatgacaacgaagacgaagtagacgagcaagctgagcagcaaaaaactcacgtatttgggcaggcgccttattctggtataaatattacaaaggagggtattcaaataggtgtcgaaggtcaaacacctaaatatgccgataaaacatttcaacctgaacctcaaataggagaatctcagtggtacgaaacagaaattaatcatgcagctgggagagtcctaaaaaagactaccccaatgaaaccatgttacggttcatatgcaaaacccacaaatgaaaatggagggcaaggcattcttgtaaagcaacaaaatggaaagctagaaagtcaagtggaaatgcaatttttctcaactactgaggcagccgcaggcaatggtgataacttgactcctaaagtggtattgtacagtgaagatgtagatatagaaaccccagacactcatatttcttacatgcccactattaaggaaggtaactcacgagaactaatgggccaacaatctatgcccaacaggcctaattacattgcttttagggacaattttattggtctaatgtattacaacagcacgggtaatatgggtgttctggcgggccaagcatcgcagttgaatgctgttgtagatttgcaagacagaaacacagagctttcataccagcttttgcttgattccattggtgatagaaccaggtacttttctatgtggaatcaggctgttgacagctatgatccagatgttagaattattgaaaatcatggaactgaagatgaacttccaaattactgctttccactgggaggtgtgattaatacagagactcttaccaaggtaaaacctaaaacaggtcaggaaaatggatgggaaaaagatgctacagaattttcagataaaaatgaaataagagttggaaataattttgccatggaaatcaatctaaatgccaacctgtggagaaatttcctgtactccaacatagcgctgtatttgcccgacaagctaaagtacagtccttccaacgtaaaaatttctgataacccaaacacctacgactacatgaacaagcgagtggtggctcccgggctagtggactgctacattaaccttggagcacgctggtcccttgactatatggacaacgtcaacccatttaaccaccaccgcaatgctggcctgcgctaccgctcaatgttgctgggcaatggtcgctatgtgcccttccacatccaggtgcctcagaagttctttgccattaaaaacctccttctcctgccgggctcatacacctacgagtggaacttcaggaaggatgttaacatggttctgcagagctccctaggaaatgacctaagggttgacggagccagcattaagtttgatagcatttgcctttacgccaccttcttccccatggcccacaacaccgcctccacgcttgaggccatgcttagaaacgacaccaacgaccagtcctttaacgactatctctccgccgccaacatgctctaccctatacccgccaacgctaccaacgtgcccatatccatcccctcccgcaactgggcggctttccgcggctgggccttcacgcgccttaagactaaggaaaccccatcactgggctcgggctacgacccttattacacctactctggctctataccctacctagatggaaccttttacctcaaccacacctttaagaaggtggccattacctttgactcttctgtcagctggcctggcaatgaccgcctgcttacccccaacgagtttgaaattaagcgctcagttgacggggagggttacaacgttgcccagtgtaacatgaccaaagactggttcctggtacaaatgctagctaactataacattggctaccagggcttctatatcccagagagctacaaggaccgcatgtactccttctttagaaacttccagcccatgagccgtcaggtggtggatgatactaaatacaaggactaccaacaggtgggcatcctacaccaacacaacaactctggatttgttggctaccttgcccccaccatgcgcgaaggacaggcctaccctgctaacttcccctatccgcttataggcaagaccgcagttgacagcattacccagaaaaagtttctttgcgatcgcaccctttggcgcatcccattctccagtaactttatgtccatgggcgcactcacagacctgggccaaaaccttctctacgccaactccgcccacgcgctagacatgacttttgaggtggatcccatggacgagcccacccttctttatgttttgtttgaagtctttgacgtggtccgtgtgcaccagccgcaccgcggcgtcatcgaaaccgtgtacctgcgcacgcccttctcggccggcaacgccacaacataaagaagcaagcaacatcaacaacagctgccgccatgggctccagtgagcaggaactgaaagccattgtcaaagatcttggttgtgggccatattttttgggcacctatgacaagcgctttccaggctttgtttctccacacaagctcgcctgcgccatagtcaatacggccggtcgcgagactgggggcgtacactggatggcctttgcctggaacccgcactcaaaaacatgctacctctttgagccctttggcttttctgaccagcgactcaagcaggtttaccagtttgagtacgagtcactcctgcgccgtagcgccattgcttcttcccccgaccgctgtataacgctggaaaagtccacccaaagcgtacaggggcccaactcggccgcctgtggactattctgctgcatgtttctccacgcctttgccaactggccccaaactcccatggatcacaaccccaccatgaaccttattaccggggtacccaactccatgctcaacagtccccaggtacagcccaccctgcgtcgcaaccaggaacagctctacagcttcctggagcgccactcgccctacttccgcagccacagtgcgcagattaggagcgccacttctttttgtcacttgaaaaacatgtaaaaataatgtactagagacactttcaataaaggcaaatgcttttatttgtacactctcgggtgattatttacccccacccttgccgtctgcgccgtttaaaaatcaaaggggttctgccgcgcatcgctatgcgccactggcagggacacgttgcgatactggtgtttagtgctccacttaaactcaggcacaaccatccgcggcagctcggtgaagttttcactccacaggctgcgcaccatcaccaacgcgtttagcaggtcgggcgccgatatcttgaagtcgcagttggggcctccgccctgcgcgcgcgagttgcgatacacagggttgcagcactggaacactatcagcgccgggtggtgcacgctggccagcacgctcttgtcggagatcagatccgcgtccaggtcctccgcgttgctcagggcgaacggagtcaactttggtagctgccttcccaaaaagggcgcgtgcccaggctttgagttgcactcgcaccgtagtggcatcaaaaggtgaccgtgcccggtctgggcgttaggatacagcgcctgcataaaagccttgatctgcttaaaagccacctgagcctttgcgccttcagagaagaacatgccgcaagacttgccggaaaactgattggccggacaggccgcgtcgtgcacgcagcaccttgcgtcggtgttggagatctgcaccacatttcggccccaccggttcttcacgatcttggccttgctagactgctccttcagcgcgcgctgcccgttttcgctcgtcacatccatttcaatcacgtgctccttatttatcataatgcttccgtgtagacacttaagctcgccttcgatctcagcgcagcggtgcagccacaacgcgcagcccgtgggctcgtgatgcttgtaggtcacctctgcaaacgactgcaggtacgcctgcaggaatcgccccatcatcgtcacaaaggtcttgttgctggtgaaggtcagctgcaacccgcggtgctcctcgttcagccaggtcttgcatacggccgccagagcttccacttggtcaggcagtagtttgaagttcgcctttagatcgttatccacgtggtacttgtccatcagcgcgcgcgcagcctccatgcccttctcccacgcagacacgatcggcacactcagcgggttcatcaccgtaatttcactttccgcttcgctgggctcttcctcttcctcttgcgtccgcataccacgcgccactgggtcgtcttcattcagccgccgcactgtgcgcttacctcctttgccatgcttgattagcaccggtgggttgctgaaacccaccatttgtagcgccacatcttctctttcttcctcgctgtccacgattacctctggtgatggcgggcgctcgggcttgggagaagggcgcttctttttcttcttgggcgcaatggccaaatccgccgccgaggtcgatggccgcgggctgggtgtgcgcggcaccagcgcgtcttgtgatgagtcttcctcgtcctcggactcgatacgccgcctcatccgcttttttgggggcgcccggggaggcggcggcgacggggacggggacgacacgtcctccatggttgggggacgtcgcgccgcaccgcgtccgcgctcgggggtggtttcgcgctgctcctcttcccgactggccatttccttctcctataggcagaaaaagatcatggagtcagtcgagaagaaggacagcctaaccgccccctctgagttcgccaccaccgcctccaccgatgccgccaacgcgcctaccaccttccccgtcgaggcacccccgcttgaggaggaggaagtgattatcgagcaggacccaggttttgtaagcgaagacgacgaggaccgctcagtaccaacagaggataaaaagcaagaccaggacaacgcagaggcaaacgaggaacaagtcgggcggggggacgaaaggcatggcgactacctagatgtgggagacgacgtgctgttgaagcatctgcagcgccagtgcgccattatctgcgacgcgttgcaagagcgcagcgatgtgcccctcgccatagcggatgtcagccttgcctacgaacgccacctattctcaccgcgcgtaccccccaaacgccaagaaaacggcacatgcgagcccaacccgcgcctcaacttctaccccgtatttgccgtgccagaggtgcttgccacctatcacatctttttccaaaactgcaagatacccctatcctgccgtgccaaccgcagccgagcggacaagcagctggccttgcggcagggcgctgtcatacctgatatcgcctcgctcaacgaagtgccaaaaatctttgagggtcttggacgcgacgagaagcgcgcggcaaacgctctgcaacaggaaaacagcgaaaatgaaagtcactctggagtgttggtggaactcgagggtgacaacgcgcgcctagccgtactaaaacgcagcatcgaggtcacccactttgcctacccggcacttaacctaccccccaaggtcatgagcacagtcatgagtgagctgatcgtgcgccgtgcgcagcccctggagagggatgcaaatttgcaagaacaaacagaggagggcctacccgcagttggcgacgagcagctagcgcgctggcttcaaacgcgcgagcctgccgacttggaggagcgacgcaaactaatgatggccgcagtgctcgttaccgtggagcttgagtgcatgcagcggttctttgctgacccggagatgcagcgcaagctagaggaaacattgcactacacctttcgacagggctacgtacgccaggcctgcaagatctccaacgtggagctctgcaacctggtctcctaccttggaattttgcacgaaaaccgccttgggcaaaacgtgcttcattccacgctcaagggcgaggcgcgccgcgactacgtccgcgactgcgtttacttatttctatgctacacctggcagacggccatgggcgtttggcagcagtgcttggaggagtgcaacctcaaggagctgcagaaactgctaaagcaaaacttgaaggacctatggacggccttcaacgagcgctccgtggccgcgcacctggcggacatcattttccccgaacgcctgcttaaaaccctgcaacagggtctgccagacttcaccagtcaaagcatgttgcagaactttaggaactttatcctagagcgctcaggaatcttgcccgccacctgctgtgcacttcctagcgactttgtgcccattaagtaccgcgaatgccctccgccgctttggggccactgctaccttctgcagctagccaactaccttgcctaccactctgacataatggaagacgtgagcggtgacggtctactggagtgtcactgtcgctgcaacctatgcaccccgcaccgctccctggtttgcaattcgcagctgcttaacgaaagtcaaattatcggtacctttgagctgcagggtccctcgcctgacgaaaagtccgcggctccggggttgaaactcactccggggctgtggacgtcggcttaccttcgcaaatttgtacctgaggactaccacgcccacgagattaggttctacgaagaccaatcccgcccgcctaatgcggagcttaccgcctgcgtcattacccagggccacattcttggccaattgcaagccatcaacaaagcccgccaagagtttctgctacgaaagggacggggggtttacttggacccccagtccggcgaggagctcaacccaatccccccgccgccgcagccctatcagcagcagccgcgggcccttgcttcccaggatggcacccaaaaagaagctgcagctgccgccgccacccacggacgaggaggaatactgggacagtcaggcagaggaggttttggacgaggaggaggaggacatgatggaagactgggagagcctagacgaggaagcttccgaggtcgaagaggtgtcagacgaaacaccgtcaccctcggtcgcattcccctcgccggcgccccagaaatcggcaaccggttccagcatggctacaacctccgctcctcaggcgccgccggcactgcccgttcgccgacccaaccgtagatgggacaccactggaaccagggccggtaagtccaagcagccgccgccgttagcccaagagcaacaacagcgccaaggctaccgctcatggcgcgggcacaagaacgccatagttgcttgcttgcaagactgtgggggcaacatctccttcgcccgccgctttcttctctaccatcacggcgtggccttcccccgtaacatcctgcattactaccgtcatctctacagcccatactgcaccggcggcagcggcagcaacagcagcggccacacagaagcaaaggcgaccggatagcaagactctgacaaagcccaagaaatccacagcggcggcagcagcaggaggaggagcgctgcgtctggcgcccaacgaacccgtatcgacccgcgagcttagaaacaggatttttcccactctgtatgctatatttcaacagagcaggggccaagaacaagagctgaaaataaaaaacaggtctctgcgatccctcacccgcagctgcctgtatcacaaaagcgaagatcagcttcggcgcacgctggaagacgcggaggctctcttcagtaaatactgcgcgctgactcttaaggactagtttcgcgccctttctcaaatttaagcgcgaaaactacgtcatctccagcggccacacccggcgccagcacctgttgtcagcgccattatgagcaaggaaattcccacgccctacatgtggagttaccagccacaaatgggacttgcggctggagctgcccaagactactcaacccgaataaactacatgagcgcgggaccccacatgatatcccgggtcaacggaatacgcgcccaccgaaaccgaattctcctggaacaggcggctattaccaccacacctcgtaataaccttaatccccgtagttggcccgctgccctggtgtaccaggaaagtcccgctcccaccactgtggtacttcccagagacgcccaggccgaagttcagatgactaactcaggggcgcagcttgcgggcggctttcgtcacagggtgcggtcgcccgggcagggtataactcacctgacaatcagagggcgaggtattcagctcaacgacgagtcggtgagctcctcgcttggtctccgtccggacgggacatttcagatcggcggcgccggccgctcttcattcacgcctcgtcaggcaatcctaactctgcagacctcgtcctctgagccgcgctctggaggcattggaactctgcaatttattgaggagtttgtgccatcggtctactttaaccccttctcgggacctcccggccactatccggatcaatttattcctaactttgacgcggtaaaggactcggcggacggctacgactgaatgttaagtggagaggcagagcaactgcgcctgaaacacctggtccactgtcgccgccacaagtgctttgcccgcgactccggtgagttttgctactttgaattgcccgaggatcatatcgagggcccggcgcacggcgtccggcttaccgcccagggagagcttgcccgtagcctgattcgggagtttacccagcgccccctgctagttgagcgggacaggggaccctgtgttctcactgtgatttgcaactgtcctaaccctggattacatcaagatcctctagttaatgtcaggtcgcctaagtcgattaactagagtacccggggatcttattccctttaactaataaaaaaaaataataaagcatcacttacttaaaatcagttagcaaatttctgtccagtttattcagcagcacctccttgccctcctcccagctctggtattgcagcttcctcctggctgcaaactttctccacaatctaaatggaatgtcagtttcctcctgttcctgtccatccgcacccactatcttcatgttgttgcagatgaagcgcgcaagaccgtctgaagataccttcaaccccgtgtatccatatgacacggaaaccggtcctccaactgtgccttttcttactcctccctttgtatcccccaatgggtttcaagagagtccccctggggtactctctttgcgcctatccgaacctctagttacctccaatggcatgcttgcgctcaaaatgggcaacggcctctctctggacgaggccggcaaccttacctcccaaaatgtaaccactgtgagcccacctctcaaaaaaaccaagtcaaacataaacctggaaatatctgcacccctcacagttacctcagaagccctaactgtggctgccgccgcacctctaatggtcgcgggcaacacactcaccatgcaatcacaggccccgctaaccgtgcacgactccaaacttagcattgccacccaaggacccctcacagtgtcagaaggaaagctagccctgcaaacatcaggccccctcaccaccaccgatagcagtacccttactatcactgcctcaccccctctaactactgccactggtagcttgggcattgacttgaaagagcccatttatacacaaaatggaaaactaggactaaagtacggggctcctttgcatgtaacagacgacctaaacactttgaccgtagcaactggtccaggtgtgactattaataatacttccttgcaaactaaagttactggagccttgggttttgattcacaaggcaatatgcaacttaatgtagcaggaggactaaggattgattctcaaaacagacgccttatacttgatgttagttatccgtttgatgctcaaaaccaactaaatctaagactaggacagggccctctttttataaactcagcccacaacttggatattaactacaacaaaggcctttacttgtttacagcttcaaacaattccaaaaagcttgaggttaacctaagcactgccaaggggttgatgtttgacgctacagccatagccattaatgcaggagatgggcttgaatttggttcacctaatgcaccaaacacaaatcccctcaaaacaaaaattggccatggcctagaatttgattcaaacaaggctatggttcctaaactaggaactggccttagttttgacagcacaggtgccattacagtaggaaacaaaaataatgataagctaactttgtggaccggaataaaccctccacctaactgtcaaattgtggaaaacactaatacaaatgatggcaaacttactttagtattagtaaaaaatggagggcttgttaatggctacgtgtctctagttggtgtatcagacactgtgaaccaaatgttcacacaaaagacagcaaacatccaattaagattatattttgactcttctggaaatctattaactgaggaatcagacttaaaaattccacttaaaaataaatcttctacagcgaccagtgaaactgtagccagcagcaaagcctttatgccaagtactacagcttatcccttcaacaccactactagggatagtgaaaactacattcatggaatatgttactacatgactagttatgatagaagtctatttcccttgaacatttctataatgctaaacagccgtatgatttcttccaatgttgcctatgccatacaatttgaatggaatctaaatgcaagtgaatctccagaaagcaacatagctacgctgaccacatccccctttttcttttcttacattacagaagacgacaactaaagaatcgtttgtgttatgtttcaacgtgtttatttttcaattgcagaaaatttcaagtcatttttcattcagtagtatagccccaccaccacatagcttatacagatcaccgtaccttaatcaaactcacagaaccctagtattcaacctgccacctccctcccaacacacagagtacacagtcctttctccccggctggccttaaaaagcatcatatcatgggtaacagacatattcttaggtgttatattccacacggtttcctgtcgagccaaacgctcatcagtgatattaataaactccccgggcagctcacttaagttcatgtcgctgtccagctgctgagccacaggctgctgtccaacttgcggttgcttaacgggcggcgaaggagaagtccacgcctacatgggggtagagtcataatcgtgcatcaggatagggcggtggtgctgcagcagcgcgcgaataaactgctgccgccgccgctccgtcctgcaggaatacaacatggcagtggtctcctcagcgatgattcgcaccgcccgcagcataaggcgccttgtcctccgggcacagcagcgcaccctgatctcacttaaatcagcacagtaactgcagcacagcaccacaatattgttcaaaatcccacagtgcaaggcgctgtatccaaagctcatggcggggaccacagaacccacgtggccatcataccacaagcgcaggtagattaagtggcgacccctcataaacacgctggacataaacattacctcttttggcatgttgtaattcaccacctcccctctgattaaacatggcgccatccaccaccatcctaaaccagctggccaaaacctgcccgccggctatacactgcagggaaccgggactggaacaatgacagtggagagcccaggactcgtaaccatggatcatcatgctcgtcatgatatcaatgttggcacaacacaggcacacgtgcatacacttcctcaggattacaagctcctcccgcgttagaaccatatcccagggaacaacccattcctgaatcagcgtaaatcccacactgcagggaagacctcgcacgtaactcacgttgtgcattgtcaaagtgttacattcgggcagcagcggatgatcctccagtatggtagcgcgggtttctgtctcaaaaggaggtagacgatccctactgtacggagtgcgccgagacaaccgagatcgtgttggtcgtagtgtcatgccaaatggaacgccggacgtagtcatatttcctgaagcaaaaccaggtgcgggcgtgacaaacagatctgcgtctccggtctcgccgcttagatcgctctgtgtagtagttgtagtatatccactctctcaaagcatccaggcgccccctggcttcgggttctatgtaaactccttcatgcgccgctgccctgataacatccaccaccgcagaataagccacacccagccaacctacacattcgttctgcgagtcacacacgggaggagcgggaagagctggaagaaccatgtttttttttttattccaaaagattatccaaaacctcaaaatgaagatctattaagtgaacgcgctcccctccggtggcgtggtcaaactctacagccaaagaacagataatggcatttgtaagatgttgcacaatggcttccaaaaggcaaacggccctcacgtccaagtggacgtaaaggctaaacccttcagggtgaatctcctctataaacattccagcaccttcaaccatgcccaaataattctcatctcgccaccttctcaatatatctctaagcaaatcccgaatattaagtccggccattgtaaaaatctgctccagagcgccctccaccttcagcctcaagcagcgaatcatgattgcaaaaattcaggttcctcacagacctgtataagattcaaaagcggaacattaacaaaaataccgcgatcccgtaggtcccttcgcagggccagctgaacataatcgtgcaggtctgcacggaccagcgcggccacttccccgccaggaaccatgacaaaagaacccacactgattatgacacgcatactcggagctatgctaaccagcgtagccccgatgtaagcttgttgcatgggcggcgatataaaatgcaaggtgctgctcaaaaaatcaggcaaagcctcgcgcaaaaaagaaagcacatcgtagtcatgctcatgcagataaaggcaggtaagctccggaaccaccacagaaaaagacaccatttttctctcaaacatgtctgcgggtttctgcataaacacaaaataaaataacaaaaaaacatttaaacattagaagcctgtcttacaacaggaaaaacaacccttataagcataagacggactacggccatgccggcgtgaccgtaaaaaaactggtcaccgtgattaaaaagcaccaccgacagctcctcggtcatgtccggagtcataatgtaagactcggtaaacacatcaggttgattcacatcggtcagtgctaaaaagcgaccgaaatagcccgggggaatacatacccgcaggcgtagagacaacattacagcccccataggaggtataacaaaattaataggagagaaaaacacataaacacctgaaaaaccctcctgcctaggcaaaatagcaccctcccgctccagaacaacatacagcgcttccacagcggcagccataacagtcagccttaccagtaaaaaagaaaacctattaaaaaaacaccactcgacacggcaccagctcaatcagtcacagtgtaaaaaagggccaagtgcagagcgagtatatataggactaaaaaatgacgtaacggttaaagtccacaaaaaacacccagaaaaccgcacgcgaacctacgcccagaaacgaaagccaaaaaacccacaacttcctcaaatcgtcacttccgttttcccacgttacgtcacttcccattttaagaaaactacaattcccaacacatacaagttactccgccctaaaacctacgtcacccgccccgttcccacgccccgcgccacgtcacaaactccaccccctcattatcatattggcttcaatccaaaataaggtatattattgatgatg

SEQ ID NO: 10 - DNA, 35690 bp, Artificial Sequence
  Adk35F2-Spike/E4orf6-E4dlO4-7(E4re#5)
ttaattaacatcatcaataatataccttattttggattgaagccaatatgataatgagggggtggagtttgtgacgtggcgcggggcgtgggaacggggcgggtgacgtagtagtgtggcggaagtgtgatgttgcaagtgtggcggaacacatgtaagcgacggatgtggcaaaagtgacgtttttggtgtgcgccggtgtacacaggaagtgacaattttcgcgcggttttaggcggatgttgtagtaaatttgggcgtaaccgagtaagatttggccattttcgcgggaaaactgaataagaggaagtgaaatctgaataattttgtgttactcatagcgcgtaataatttctgtaatagtaatcaattacggggtcattagttcatagcccatatatggagttccgcgttacataacttacggtaaatggcccgcctggctgaccgcccaacgacccccgcccattgacgtcaataatgacgtatgttcccatagtaacgccaatagggactttccattgacgtcaatgggtggagtatttacggtaaactgcccacttggcagtacatcaagtgtatcatatgccaagtacgccccctattgacgtcaatgacggtaaatggcccgcctggcattatgcccagtacatgaccttatgggactttcctacttggcagtacatctacgtattagtcatcgctattaccatggtgatgcggttttggcagtacatcaatgggcgtggatagcggtttgactcacggggatttccaagtctccaccccattgacgtcaatgggagtttgttttggcaccaaaatcaacgggactttccaaaatgtcgtaacaactccgccccattgacgcaaatgggcggtaggcgtgtacggtgggaggtctatataagcagagctctccctatcagtgatagagatctccctatcagtgatagagatcgtcgacgagctcgtttagtgaaccgtcagatcgcctggagacgccatccacgctgttttgacctccatagaagacaccgggaccgatccagcctccgatttgccaccatgtttgtgttcctggtgctgctgccactggtgtccagccagtgtgtgaacctgaccaccaggacccaacttcctcctgcctacaccaactccttcaccaggggagtctactaccctgacaaggtgttcaggtcctctgtgctgcacagcacccaggacctgttcctgccattcttcagcaatgtgacctggttccatgccatccatgtgtctggcaccaatggcaccaagaggtttgacaaccctgtgctgccattcaatgatggagtctactttgccagcacagagaagagcaacatcatcaggggctggatttttggcaccaccctggacagcaagacccagtccctgctgattgtgaacaatgccaccaatgtggtgattaaggtgtgtgagttccagttctgtaatgacccattcctgggagtctactaccacaagaacaacaagtcctggatggagtctgagttcagggtctactcctctgccaacaactgtacctttgaatatgtgagccaaccattcctgatggacttggagggcaagcagggcaacttcaagaacctgagggagtttgtgttcaagaacattgatggctacttcaagatttacagcaaacacacaccaatcaacctggtgagggacctgccacagggcttctctgccttggaaccactggtggacctgccaattggcatcaacatcaccaggttccagaccctgctggctctgcacaggtcctacctgacacctggagactcctcctctggctggacagcaggagcagcagcctactatgtgggctacctccaaccaaggaccttcctgctgaaatacaatgagaatggcaccatcacagatgctgtggactgtgccctggacccactgtctgagaccaagtgtaccctgaaatccttcacagtggagaagggcatctaccagaccagcaacttcagggtccaaccaacagagagcattgtgaggtttccaaacatcaccaacctgtgtccatttggagaggtgttcaatgccaccaggtttgcctctgtctatgcctggaacaggaagaggattagcaactgtgtggctgactactctgtgctctacaactctgcctccttcagcaccttcaagtgttatggagtgagcccaaccaaactgaatgacctgtgtttcaccaatgtctatgctgactcctttgtgattaggggagatgaggtgagacagattgcccctggacaaacaggcaagattgctgactacaactacaaactgcctgatgacttcacaggctgtgtgattgcctggaacagcaacaacctggacagcaaggtgggaggcaactacaactacctctacagactgttcaggaagagcaacctgaaaccatttgagagggacatcagcacagagatttaccaggctggcagcacaccatgtaatggagtggagggcttcaactgttactttccactccaatcctatggcttccaaccaaccaatggagtgggctaccaaccatacagggtggtggtgctgtcctttgaactgctccatgcccctgccacagtgtgtggaccaaagaagagcaccaacctggtgaagaacaagtgtgtgaacttcaacttcaatggactgacaggcacaggagtgctgacagagagcaacaagaagttcctgccattccaacagtttggcagggacattgctgacaccacagatgctgtgagggacccacagaccttggagattctggacatcacaccatgttcctttggaggagtgtctgtgattacacctggcaccaacaccagcaaccaggtggctgtgctctaccaggatgtgaactgtactgaggtgcctgtggctatccatgctgaccaacttacaccaacctggagggtctacagcacaggcagcaatgtgttccagaccagggctggctgtctgattggagcagagcatgtgaacaactcctatgagtgtgacatcccaattggagcaggcatctgtgcctcctaccagacccagaccggtggcggtgggtcgaggtctgtggcaagccagagcatcattgcctacacaatgagtctgggagcagagaactctgtggcttacagcaacaacagcattgccatcccaaccaacttcaccatctctgtgaccacagagattctgcctgtgagtatgaccaagacctctgtggactgtacaatgtatatctgtggagacagcacagagtgtagcaacctgctgctccaatatggctccttctgtacccaacttaacagggctctgacaggcattgctgtggaacaggacaagaacacccaggaggtgtttgcccaggtgaagcagatttacaagacacctccaatcaaggactttggaggcttcaacttcagccagattctgcctgacccaagcaagccaagcaagaggtccttcattgaggacctgctgttcaacaaggtgaccctggctgatgctggcttcatcaagcaatatggagactgtctgggagacattgctgccagggacctgatttgtgcccagaagttcaatggactgacagtgctgcctccactgctgacagatgagatgattgcccaatacacctctgccctgctggctggcaccatcacctctggctggacctttggagcaggagcagccctccaaatcccatttgctatgcagatggcttacaggttcaatggcattggagtgacccagaatgtgctctatgagaaccagaaactgattgccaaccagttcaactctgccattggcaagattcaggactccctgtccagcacagcctctgccctgggcaaactccaagatgtggtgaaccagaatgcccaggctctgaacaccctggtgaagcaactttccagcaactttggagccatctcctctgtgctgaatgacatcctgagcagactggacaaggtggaggctgaggtccagattgacagactgattacaggcagactccaatccctccaaacctatgtgacccaacaacttatcagggctgctgagattagggcatctgccaacctggctgccaccaagatgagtgagtgtgtgctgggacaaagcaagagggtggacttctgtggcaagggctaccacctgatgagttttccacagtctgcccctcatggagtggtgttcctgcatgtgacctatgtgcctgcccaggagaagaacttcaccacagcccctgccatctgccatgatggcaaggctcactttccaagggagggagtgtttgtgagcaatggcacccactggtttgtgacccagaggaacttctatgaaccacagattatcaccacagacaacacctttgtgtctggcaactgtgatgtggtgattggcattgtgaacaacacagtctatgacccactccaacctgaactggactccttcaaggaggaactggacaaatacttcaagaaccacaccagccctgatgtggacctgggagacatctctggcatcaatgcctctgtggtgaacatccagaaggagattgacagactgaatgaggtggctaagaacctgaatgagtccctgattgacctccaagaactgggcaaatatgaacaatacatcaagtggccatgaaaattgatcataatcagccataccacatttgtagaggttttacttgctttaaaaaacctcccacacctccccctgaacctgaaacataaaatgaatgcaattgttgttgttaacttgtttattgcagcttataatggttacaaataaagcaatagcatcacaaatttcacaaataaagcatttttttcactgcattctagttgtggtttgtccaaactcatcaatgtatcttaacgcggatcgctccggtgcccgtcagtgggcagagcgcacatcgcccacagtccccgagaagttggggggaggggtcggcaattgaaccggtgcctagagaaggtggcgcggggtaaactgggaaagtgatgtcgtgtactggctccgcctttttcccgagggtgggggagaaccgtatataagtgcagtagtcgccgtgaacgttctttttcgcaacgggtttgccgccagaacacaggtaagtgccgtgtgtggttcccgcgggcctggcctctttacgggttatggcccttgcgtgccttgaattacttccacgcccctggctgcagtacgtgattcttgatcccgagcttcgggttggaagtgggtgggagagttcgaggccttgcgcttaaggagccccttcgcctcgtgcttgagttgaggcttggcctgggcgctggggccgccgcgtgcgaatctggtggcaccttcgcgcctgtctcgctgctttcgataagtctctagccatttaaaatttttgatgacctgctgcgacgctttttttctggcaagatagtcttgtaaatgcgggccaagatctgcacactggtatttcggtttttggggccgcgggcggcgacggggcccgtgcgtcccagcgcacatgttcggcgaggcggggcctgcgagcgcggccaccgagaatcggacgggggtagtctcaagctggccggcctgctctggtgcctggcctcgcgccgccgtgtatcgccccgccctgggcggcaaggctggcccggtcggcaccagttgcgtgagcggaaagatggccgcttcccggccctgctgcagggagctcaaaatggaggacgcggcgctcgggagagcgggcgggtgagtcacccacacaaaggaaaagggcctttccgtcctcagccgtcgcttcatgtgactccacggagtaccgggcgccgtccaggcacctcgattagttctcgagcttttggagtacgtcgtctttaggttggggggaggggttttatgcgatggagtttccccatactgagtgggtggagactgaagttaggccagcttggcacttgatgtaattctccttggaatttgccctttttgagtttggatcttggttcattctcaagcctcagacagtggttcaaagtttttttcttccatttaaggtgtcgtgaaaactaccccaagctggccaccatgactacgtccggcgttccatttggcatgacactacgaccaacacgatctcggttgtctcggcgcactccgtacagtagggatcgtctacctccttttgagacagaaacccgcgctaccatactggaggatcatccgctgctgcccgaatgtaacactttgacaatgcacaacgtgagttacgtgcgaggtcttccctgcagtgtgggatttacgctgattcaggaatgggttgttccctgggatatggttctaacgcgggaggagcttgtaatcctgaggaagtgtatgcacgtgtgcctgtgttgtgccaacattgatatcatgacgagcatgatgatccatggttacgagtcctgggctctccactgtcattgttccagtcccggttccctgcagtgtatagccggcgggcaggttttggccagctggtttaggatggtggtggatggcgccatgtttaatcagaggtttatatggtaccgggaggtggtgaattacaacatgccaaaagaggtaatgtttatgtccagcgtgtttatgaggggtcgccacttaatctacctgcgcttgtggtatgatggccacgtgggttctgtggtccccgccatgagctttggatacagcgccttgcactgtgggattttgaacaatattgtggtgctgtgctgcagttactgtgctgatttaagtgagatcagggtgcgctgctgtgcccggaggacaaggcgccttatgctgcgggcggtgcgaatcatcgctgaggagaccactgccatgttgtattcctgcaggacggagcggcggcggcagcagtttattcgcgcgctgctgcagcaccaccgccctatcctgatgcacgattatgactctacccccatgtagaagcttggggatcaattctctagagctcgctgatcagcctcgactgtgccttctagttgccagccatctgttgtttgcccctcccccgtgccttccttgaccctggaaggtgccactcccactgtcctttcctaataaaatgaggaaattgcatcgcattgtctgagtaggtgtcattctattctggggggtggggtggggcaggacagcaagggggaggattgggaagacaatagcaggcatgctggggatgcggtgggctctatggcttctgaggaaattgggcgtggcttaagggtgggaaagaatatataaggtgggggtcttatgtagttttgtatctgttttgcagcagccgccgccgccatgagcaccaactcgtttgatggaagcattgtgagctcatatttgacaacgcgcatgcccccatgggccggggtgcgtcagaatgtgatgggctccagcattgatggtcgccccgtcctgcccgcaaactctactaccttgacctacgagaccgtgtctggaacgccgttggagactgcagcctccgccgccgcttcagccgctgcagccaccgcccgcgggattgtgactgactttgctttcctgagcccgcttgcaagcagtgcagcttcccgttcatccgcccgcgatgacaagttgacggctcttttggcacaattggattctttgacccgggaacttaatgtcgtttctcagcagctgttggatctgcgccagcaggtttctgccctgaaggcttcctcccctcccaatgcggtttaaaacataaataaaaaaccagactctgtttggatttggatcaagcaagtgtcttgctgtctttatttaggggttttgcgcgcgcggtaggcccgggaccagcggtctcggtcgttgagggtcctgtgtattttttccaggacgtggtaaaggtgactctggatgttcagatacatgggcataagcccgtctctggggtggaggtagcaccactgcagagcttcatgctgcggggtggtgttgtagatgatccagtcgtagcaggagcgctgggcgtggtgcctaaaaatgtctttcagtagcaagctgattgccaggggcaggcccttggtgtaagtgtttacaaagcggttaagctgggatgggtgcatacgtggggatatgagatgcatcttggactgtatttttaggttggctatgttcccagccatatccctccggggattcatgttgtgcagaaccaccagcacagtgtatccggtgcacttgggaaatttgtcatgtagcttagaaggaaatgcgtggaagaacttggagacgcccttgtgacctccaagattttccatgcattcgtccataatgatggcaatgggcccacgggcggcggcctgggcgaagatatttctgggatcactaacgtcatagttgtgttccaggatgagatcgtcataggccatttttacaaagcgcgggcggagggtgccagactgcggtataatggttccatccggcccaggggcgtagttaccctcacagatttgcatttcccacgctttgagttcagatggggggatcatgtctacctgcggggcgatgaagaaaacggtttccggggtaggggagatcagctgggaagaaagcaggttcctgagcagctgcgacttaccgcagccggtgggcccgtaaatcacacctattaccgggtgcaactggtagttaagagagctgcagctgccgtcatccctgagcaggggggccacttcgttaagcatgtccctgactcgcatgttttccctgaccaaatccgccagaaggcgctcgccgcccagcgatagcagttcttgcaaggaagcaaagtttttcaacggtttgagaccgtccgccgtaggcatgcttttgagcgtttgaccaagcagttccaggcggtcccacagctcggtcacctgctctacggcatctcgatccagcatatctcctcgtttcgcgggttggggcggctttcgctgtacggcagtagtcggtgctcgtccagacgggccagggtcatgtctttccacgggcgcagggtcctcgtcagcgtagtctgggtcacggtgaaggggtgcgctccgggctgcgcgctggccagggtgcgcttgaggctggtcctgctggtgctgaagcgctgccggtcttcgccctgcgcgtcggccaggtagcatttgaccatggtgtcatagtccagcccctccgcggcgtggcccttggcgcgcagcttgcccttggaggaggcgccgcacgaggggcagtgcagacttttgagggcgtagagcttgggcgcgagaaataccgattccggggagtaggcatccgcgccgcaggccccgcagacggtctcgcattccacgagccaggtgagctctggccgttcggggtcaaaaaccaggtttcccccatgctttttgatgcgtttcttacctctggtttccatgagccggtgtccacgctcggtgacgaaaaggctgtccgtgtccccgtatacagacttgagaggcctgtcctcgagcggtgttccgcggtcctcctcgtatagaaactcggaccactctgagacaaaggctcgcgtccaggccagcacgaaggaggctaagtgggaggggtagcggtcgttgtccactagggggtccactcgctccagggtgtgaagacacatgtcgccctcttcggcatcaaggaaggtgattggtttgtaggtgtaggccacgtgaccgggtgttcctgaaggggggctataaaagggggtgggggcgcgttcgtcctcactctcttccgcatcgctgtctgcgagggccagctgttggggtgagtactccctctgaaaagcgggcatgacttctgcgctaagattgtcagtttccaaaaacgaggaggatttgatattcacctggcccgcggtgatgcctttgagggtggccgcatccatctggtcagaaaagacaatctttttgttgtcaagcttggtggcaaacgacccgtagagggcgttggacagcaacttggcgatggagcgcagggtttggtttttgtcgcgatcggcgcgctccttggccgcgatgtttagctgcacgtattcgcgcgcaacgcaccgccattcgggaaagacggtggtgcgctcgtcgggcaccaggtgcacgcgccaaccgcggttgtgcagggtgacaaggtcaacgctggtggctacctctccgcgtaggcgctcgttggtccagcagaggcggccgcccttgcgcgagcagaatggcggtagggggtctagctgcgtctcgtccggggggtctgcgtccacggtaaagaccccgggcagcaggcgcgcgtcgaagtagtctatcttgcatccttgcaagtctagcgcctgctgccatgcgcgggcggcaagcgcgcgctcgtatgggttgagtgggggaccccatggcatggggtgggtgagcgcggaggcgtacatgccgcaaatgtcgtaaacgtagaggggctctctgagtattccaagatatgtagggtagcatcttccaccgcggatgctggcgcgcacgtaatcgtatagttcgtgcgagggagcgaggaggtcgggaccgaggttgctacgggcgggctgctctgctcggaagactatctgcctgaagatggcatgtgagttggatgatatggttggacgctggaagacgttgaagctggcgtctgtgagacctaccgcgtcacgcacgaaggaggcgtaggagtcgcgcagcttgttgaccagctcggcggtgacctgcacgtctagggcgcagtagtccagggtttccttgatgatgtcatacttatcctgtcccttttttttccacagctcgcggttgaggacaaactcttcgcggtctttccagtactcttggatcggaaacccgtcggcctccgaacggtaagagcctagcatgtagaactggttgacggcctggtaggcgcagcatcccttttctacgggtagcgcgtatgcctgcgcggccttccggagcgaggtgtgggtgagcgcaaaggtgtccctgaccatgactttgaggtactggtatttgaagtcagtgtcgtcgcatccgccctgctcccagagcaaaaagtccgtgcgctttttggaacgcggatttggcagggcgaaggtgacatcgttgaagagtatctttcccgcgcgaggcataaagttgcgtgtgatgcggaagggtcccggcacctcggaacggttgttaattacctgggcggcgagcacgatctcgtcaaagccgttgatgttgtggcccacaatgtaaagttccaagaagcgcgggatgcccttgatggaaggcaattttttaagttcctcgtaggtgagctcttcaggggagctgagcccgtgctctgaaagggcccagtctgcaagatgagggttggaagcgacgaatgagctccacaggtcacgggccattagcatttgcaggtggtcgcgaaaggtcctaaactggcgacctatggccattttttctggggtgatgcagtagaaggtaagcgggtcttgttcccagcggtcccatccaaggttcgcggctaggtctcgcgcggcagtcactagaggctcatctccgccgaacttcatgaccagcatgaagggcacgagctgcttcccaaaggcccccatccaagtataggtctctacatcgtaggtgacaaagagacgctcggtgcgaggatgcgagccgatcgggaagaactggatctcccgccaccaattggaggagtggctattgatgtggtgaaagtagaagtccctgcgacgggccgaacactcgtgctggcttttgtaaaaacgtgcgcagtactggcagcggtgcacgggctgtacatcctgcacgaggttgacctgacgaccgcgcacaaggaagcagagtgggaatttgagcccctcgcctggcgggtttggctggtggtcttctacttcggctgcttgtccttgaccgtctggctgctcgaggggagttacggtggatcggaccaccacgccgcgcgagcccaaagtccagatgtccgcgcgcggcggtcggagcttgatgacaacatcgcgcagatgggagctgtccatggtctggagctcccgcggcgtcaggtcaggcgggagctcctgcaggtttacctcgcatagacgggtcagggcgcgggctagatccaggtgatacctaatttccaggggctggttggtggcggcgtcgatggcttgcaagaggccgcatccccgcggcgcgactacggtaccgcgcggcgggcggtgggccgcgggggtgtccttggatgatgcatctaaaagcggtgacgcgggcgagcccccggaggtagggggggctccggacccgccgggagagggggcaggggcacgtcggcgccgcgcgcgggcaggagctggtgctgcgcgcgtaggttgctggcgaacgcgacgacgcggcggttgatctcctgaatctggcgcctctgcgtgaagacgacgggcccggtgagcttgaacctgaaagagagttcgacagaatcaatttcggtgtcgttgacggcggcctggcgcaaaatctcctgcacgtctcctgagttgtcttgataggcgatctcggccatgaactgctcgatctcttcctcctggagatctccgcgtccggctcgctccacggtggcggcgaggtcgttggaaatgcgggccatgagctgcgagaaggcgttgaggcctccctcgttccagacgcggctgtagaccacgcccccttcggcatcgcgggcgcgcatgaccacctgcgcgagattgagctccacgtgccgggcgaagacggcgtagtttcgcaggcgctgaaagaggtagttgagggtggtggcggtgtgttctgccacgaagaagtacataacccagcgtcgcaacgtggattcgttgatatcccccaaggcctcaaggcgctccatggcctcgtagaagtccacggcgaagttgaaaaactgggagttgcgcgccgacacggttaactcctcctccagaagacggatgagctcggcgacagtgtcgcgcacctcgcgctcaaaggctacaggggcctcttcttcttcttcaatctcctcttccataagggcctccccttcttcttcttctggcggcggtgggggaggggggacacggcggcgacgacggcgcaccgggaggcggtcgacaaagcgctcgatcatctccccgcggcgacggcgcatggtctcggtgacggcgcggccgttctcgcgggggcgcagttggaagacgccgcccgtcatgtcccggttatgggttggcggggggctgccatgcggcagggatacggcgctaacgatgcatctcaacaattgttgtgtaggtactccgccgccgagggacctgagcgagtccgcatcgaccggatcggaaaacctctcgagaaaggcgtctaaccagtcacagtcgcaaggtaggctgagcaccgtggcgggcggcagcgggcggcggtcggggttgtttctggcggaggtgctgctgatgatgtaattaaagtaggcggtcttgagacggcggatggtcgacagaagcaccatgtccttgggtccggcctgctgaatgcgcaggcggtcggccatgccccaggcttcgttttgacatcggcgcaggtctttgtagtagtcttgcatgagcctttctaccggcacttcttcttctccttcctcttgtcctgcatctcttgcatctatcgctgcggcggcggcggagtttggccgtaggtggcgccctcttcctcccatgcgtgtgaccccgaagcccctcatcggctgaagcagggctaggtcggcgacaacgcgctcggctaatatggcctgctgcacctgcgtgagggtagactggaagtcatccatgtccacaaagcggtggtatgcgcccgtgttgatggtgtaagtgcagttggccataacggaccagttaacggtctggtgacccggctgcgagagctcggtgtacctgagacgcgagtaagccctcgagtcaaatacgtagtcgttgcaagtccgcaccaggtactggtatcccaccaaaaagtgcggcggcggctggcggtagaggggccagcgtagggtggccggggctccgggggcgagatcttccaacataaggcgatgatatccgtagatgtacctggacatccaggtgatgccggcggcggtggtggaggcgcgcggaaagtcgcggacgcggttccagatgttgcgcagcggcaaaaagtgctccatggtcgggacgctctggccggtcaggcgcgcgcaatcgttgacgctctagcgtgcaaaaggagagcctgtaagcgggcactcttccgtggtctggtggataaattcgcaagggtatcatggcggacgaccggggttcgagccccgtatccggccgtccgccgtgatccatgcggttaccgcccgcgtgtcgaacccaggtgtgcgacgtcagacaacgggggagtgctccttttggcttccttccaggcgcggcggctgctgcgctagcttttttggccactggccgcgcgcagcgtaagcggttaggctggaaagcgaaagcattaagtggctcgctccctgtagccggagggttattttccaagggttgagtcgcgggacccccggttcgagtctcggaccggccggactgcggcgaacgggggtttgcctccccgtcatgcaagaccccgcttgcaaattcctccggaaacagggacgagccccttttttgcttttcccagatgcatccggtgctgcggcagatgcgcccccctcctcagcagcggcaagagcaagagcagcggcagacatgcagggcaccctcccctcctcctaccgcgtcaggaggggcgacatccgcggttgacgcggcagcagatggtgattacgaacccccgcggcgccgggcccggcactacctggacttggaggagggcgagggcctggcgcggctaggagcgccctctcctgagcggcacccaagggtgcagctgaagcgtgatacgcgtgaggcgtacgtgccgcggcagaacctgtttcgcgaccgcgagggagaggagcccgaggagatgcgggatcgaaagttccacgcagggcgcgagctgcggcatggcctgaatcgcgagcggttgctgcgcgaggaggactttgagcccgacgcgcgaaccgggattagtcccgcgcgcgcacacgtggcggccgccgacctggtaaccgcatacgagcagacggtgaaccaggagattaactttcaaaaaagctttaacaaccacgtgcgtacgcttgtggcgcgcgaggaggtggctataggactgatgcatctgtgggactttgtaagcgcgctggagcaaaacccaaatagcaagccgctcatggcgcagctgttccttatagtgcagcacagcagggacaacgaggcattcagggatgcgctgctaaacatagtagagcccgagggccgctggctgctcgatttgataaacatcctgcagagcatagtggtgcaggagcgcagcttgagcctggctgacaaggtggccgccatcaactattccatgcttagcctgggcaagttttacgcccgcaagatataccataccccttacgttcccatagacaaggaggtaaagatcgaggggttctacatgcgcatggcgctgaaggtgcttaccttgagcgacgacctgggcgtttatcgcaacgagcgcatccacaaggccgtgagcgtgagccggcggcgcgagctcagcgaccgcgagctgatgcacagcctgcaaagggccctggctggcacgggcagcggcgatagagaggccgagtcctactttgacgcgggcgctgacctgcgctgggccccaagccgacgcgccctggaggcagctggggccggacctgggctggcggtggcacccgcgcgcgctggcaacgtcggcggcgtggaggaatatgacgaggacgatgagtacgagccagaggacggcgagtactaagcggtgatgtttctgatcagatgatgcaagacgcaacggacccggcggtgcgggcggcgctgcagagccagccgtccggccttaactccacggacgactggcgccaggtcatggaccgcatcatgtcgctgactgcgcgcaatcctgacgcgttccggcagcagccgcaggccaaccggctctccgcaattctggaagcggtggtcccggcgcgcgcaaaccccacgcacgagaaggtgctggcgatcgtaaacgcgctggccgaaaacagggccatccggcccgacgaggccggcctggtctacgacgcgctgcttcagcgcgtggctcgttacaacagcggcaacgtgcagaccaacctggaccggctggtgggggatgtgcgcgaggccgtggcgcagcgtgagcgcgcgcagcagcagggcaacctgggctccatggttgcactaaacgccttcctgagtacacagcccgccaacgtgccgcggggacaggaggactacaccaactttgtgagcgcactgcggctaatggtgactgagacaccgcaaagtgaggtgtaccagtctgggccagactattttttccagaccagtagacaaggcctgcagaccgtaaacctgagccaggctttcaaaaacttgcaggggctgtggggggtgcgggctcccacaggcgaccgcgcgaccgtgtctagcttgctgacgcccaactcgcgcctgttgctgctgctaatagcgcccttcacggacagtggcagcgtgtcccgggacacatacctaggtcacttgctgacactgtaccgcgaggccataggtcaggcgcatgtggacgagcatactttccaggagattacaagtgtcagccgcgcgctggggcaggaggacacgggcagcctggaggcaaccctaaactacctgctgaccaaccggcggcagaagatcccctcgttgcacagtttaaacagcgaggaggagcgcattttgcgctacgtgcagcagagcgtgagccttaacctgatgcgcgacggggtaacgcccagcgtggcgctggacatgaccgcgcgcaacatggaaccgggcatgtatgcctcaaaccggccgtttatcaaccgcctaatggactacttgcatcgcgcggccgccgtgaaccccgagtatttcaccaatgccatcttgaacccgcactggctaccgccccctggtttctacaccgggggattcgaggtgcccgagggtaacgatggattcctctgggacgacatagacgacagcgtgttttccccgcaaccgcagaccctgctagagttgcaacagcgcgagcaggcagaggcggcgctgcgaaaggaaagcttccgcaggccaagcagcttgtccgatctaggcgctgcggccccgcggtcagatgctagtagcccatttccaagcttgatagggtctcttaccagcactcgcaccacccgcccgcgcctgctgggcgaggaggagtacctaaacaactcgctgctgcagccgcagcgcgaaaaaaacctgcctccggcatttcccaacaacgggatagagagcctagtggacaagatgagtagatggaagacgtacgcgcaggagcacagggacgtgccaggcccgcgcccgcccacccgtcgtcaaaggcacgaccgtcagcggggtctggtgtgggaggacgatgactcggcagacgacagcagcgtcctggatttgggagggagtggcaacccgtttgcgcaccttcgccccaggctggggagaatgttttaaaaaaaaaaaagcatgatgcaaaataaaaaactcaccaaggccatggcaccgagcgttggttttcttgtattccccttagtatgcggcgcgcggcgatgtatgaggaaggtcctcctccctcctacgagagtgtggtgagcgcggcgccagtggcggcggcgctgggttctcccttcgatgctcccctggacccgccgtttgtgcctccgcggtacctgcggcctaccggggggagaaacagcatccgttactctgagttggcacccctattcgacaccacccgtgtgtacctggtggacaacaagtcaacggatgtggcatccctgaactaccagaacgaccacagcaactttctgaccacggtcattcaaaacaatgactacagcccgggggaggcaagcacacagaccatcaatcttgacgaccggtcgcactggggcggcgacctgaaaaccatcctgcataccaacatgccaaatgtgaacgagttcatgtttaccaataagtttaaggcgcgggtgatggtgtcgcgcttgcctactaaggacaatcaggtggagctgaaatacgagtgggtggagttcacgctgcccgagggcaactactccgagaccatgaccatagaccttatgaacaacgcgatcgtggagcactacttgaaagtgggcagacagaacggggttctggaaagcgacatcggggtaaagtttgacacccgcaacttcagactggggtttgaccccgtcactggtcttgtcatgcctggggtatatacaaacgaagccttccatccagacatcattttgctgccaggatgcggggtggacttcacccacagccgcctgagcaacttgttgggcatccgcaagcggcaacccttccaggagggctttaggatcacctacgatgatctggagggtggtaacattcccgcactgttggatgtggacgcctaccaggcgagcttgaaagatgacaccgaacagggcgggggtggcgcaggcggcagcaacagcagtggcagcggcgcggaagagaactccaacgcggcagccgcggcaatgcagccggtggaggacatgaacgatcatgccattcgcggcgacacctttgccacacgggctgaggagaagcgcgctgaggccgaagcagcggccgaagctgccgcccccgctgcgcaacccgaggtcgagaagcctcagaagaaaccggtgatcaaacccctgacagaggacagcaagaaacgcagttacaacctaataagcaatgacagcaccttcacccagtaccgcagctggtaccttgcatacaactacggcgaccctcagaccggaatccgctcatggaccctgctttgcactcctgacgtaacctgcggctcggagcaggtctactggtcgttgccagacatgatgcaagaccccgtgaccttccgctccacgcgccagatcagcaactttccggtggtgggcgccgagctgttgcccgtgcactccaagagcttctacaacgaccaggccgtctactcccaactcatccgccagtttacctctctgacccacgtgttcaatcgctttcccgagaaccagattttggcgcgcccgccagcccccaccatcaccaccgtcagtgaaaacgttcctgctctcacagatcacgggacgctaccgctgcgcaacagcatcggaggagtccagcgagtgaccattactgacgccagacgccgcacctgcccctacgtttacaaggccctgggcatagtctcgccgcgcgtcctatcgagccgcactttttgagcaagcatgtccatccttatatcgcccagcaataacacaggctggggcctgcgcttcccaagcaagatgtttggcggggccaagaagcgctccgaccaacacccagtgcgcgtgcgcgggcactaccgcgcgccctggggcgcgcacaaacgcggccgcactgggcgcaccaccgtcgatgacgccatcgacgcggtggtggaggaggcgcgcaactacacgcccacgccgccaccagtgtccacagtggacgcggccattcagaccgtggtgcgcggagcccggcgctatgctaaaatgaagagacggcggaggcgcgtagcacgtcgccaccgccgccgacccggcactgccgcccaacgcgcggcggcggccctgcttaaccgcgcacgtcgcaccggccgacgggcggccatgcgggccgctcgaaggctggccgcgggtattgtcactgtgccccccaggtccaggcgacgagcggccgccgcagcagccgcggccattagtgctatgactcagggtcgcaggggcaacgtgtattgggtgcgcgactcggttagcggcctgcgcgtgcccgtgcgcacccgccccccgcgcaactagattgcaagaaaaaactacttagactcgtactgttgtatgtatccagcggcggcggcgcgcaacgaagctatgtccaagcgcaaaatcaaagaagagatgctccaggtcatcgcgccggagatctatggccccccgaagaaggaagagcaggattacaagccccgaaagctaaagcgggtcaaaaagaaaaagaaagatgatgatgatgaacttgacgacgaggtggaactgctgcacgctaccgcgcccaggcgacgggtacagtggaaaggtcgacgcgtaaaacgtgttttgcgacccggcaccaccgtagtctttacgcccggtgagcgctccacccgcacctacaagcgcgtgtatgatgaggtgtacggcgacgaggacctgcttgagcaggccaacgagcgcctcggggagtttgcctacggaaagcggcataaggacatgctggcgttgccgctggacgagggcaacccaacacctagcctaaagcccgtaacactgcagcaggtgctgcccgcgcttgcaccgtccgaagaaaagcgcggcctaaagcgcgagtctggtgacttggcacccaccgtgcagctgatggtacccaagcgccagcgactggaagatgtcttggaaaaaatgaccgtggaacctgggctggagcccgaggtccgcgtgcggccaatcaagcaggtggcgccgggactgggcgtgcagaccgtggacgttcagatacccactaccagtagcaccagtattgccaccgccacagagggcatggagacacaaacgtccccggttgcctcagcggtggcggatgccgcggtgcaggcggtcgctgcggccgcgtccaagacctctacggaggtgcaaacggacccgtggatgtttcgcgtttcagccccccggcgcccgcgccgttcgaggaagtacggcgccgccagcgcgctactgcccgaatatgccctacatccttccattgcgcctacccccggctatcgtggctacacctaccgccccagaagacgagcaactacccgacgccgaaccaccactggaacccgccgccgccgtcgccgtcgccagcccgtgctggccccgatttccgtgcgcagggtggctcgcgaaggaggcaggaccctggtgctgccaacagcgcgctaccaccccagcatcgtttaaaagccggtctttgtggttcttgcagatatggccctcacctgccgcctccgtttcccggtgccgggattccgaggaagaatgcaccgtaggaggggcatggccggccacggcctgacgggcggcatgcgtcgtgcgcaccaccggcggcggcgcgcgtcgcaccgtcgcatgcgcggcggtatcctgcccctccttattccactgatcgccgcggcgattggcgccgtgcccggaattgcatccgtggccttgcaggcgcagagacactgattaaaaacaagttgcatgtggaaaaatcaaaataaaaagtctggactctcacgctcgcttggtcctgtaactattttgtagaatggaagacatcaactttgcgtctctggccccgcgacacggctcgcgcccgttcatgggaaactggcaagatatcggcaccagcaatatgagcggtggcgccttcagctggggctcgctgtggagcggcattaaaaatttcggttccaccgttaagaactatggcagcaaggcctggaacagcagcacaggccagatgctgagggataagttgaaagagcaaaatttccaacaaaaggtggtagatggcctggcctctggcattagcggggtggtggacctggccaaccaggcagtgcaaaataagattaacagtaagcttgatccccgccctcccgtagaggagcctccaccggccgtggagacagtgtctccagaggggcgtggcgaaaagcgtccgcgccccgacagggaagaaactctggtgacgcaaatagacgagcctccctcgtacgaggaggcactaaagcaaggcctgcccaccacccgtcccatcgcgcccatggctaccggagtgctgggccagcacacacccgtaacgctggacctgcctccccccgccgacacccagcagaaacctgtgctgccaggcccgaccgccgttgttgtaacccgtcctagccgcgcgtccctgcgccgcgccgccagcggtccgcgatcgttgcggcccgtagccagtggcaactggcaaagcacactgaacagcatcgtgggtctgggggtgcaatccctgaagcgccgacgatgcttctgatagctaacgtgtcgtatgtgtgtcatgtatgcgtccatgtcgccgccagaggagctgctgagccgccgcgcgcccgctttccaagatggctaccccttcgatgatgccgcagtggtcttacatgcacatctcgggccaggacgcctcggagtacctgagccccgggctggtgcagtttgcccgcgccaccgagacgtacttcagcctgaataacaagtttagaaaccccacggtggcgcctacgcacgacgtgaccacagaccggtcccagcgtttgacgctgcggttcatccctgtggaccgtgaggatactgcgtactcgtacaaggcgcggttcaccctagctgtgggtgataaccgtgtgctggacatggcttccacgtactttgacatccgcggcgtgctggacaggggccctacttttaagccctactctggcactgcctacaacgccctggctcccaagggtgccccaaatccttgcgaatgggatgaagctgctactgctcttgaaataaacctagaagaagaggacgatgacaacgaagacgaagtagacgagcaagctgagcagcaaaaaactcacgtatttgggcaggcgccttattctggtataaatattacaaaggagggtattcaaataggtgtcgaaggtcaaacacctaaatatgccgataaaacatttcaacctgaacctcaaataggagaatctcagtggtacgaaacagaaattaatcatgcagctgggagagtcctaaaaaagactaccccaatgaaaccatgttacggttcatatgcaaaacccacaaatgaaaatggagggcaaggcattcttgtaaagcaacaaaatggaaagctagaaagtcaagtggaaatgcaatttttctcaactactgaggcagccgcaggcaatggtgataacttgactcctaaagtggtattgtacagtgaagatgtagatatagaaaccccagacactcatatttcttacatgcccactattaaggaaggtaactcacgagaactaatgggccaacaatctatgcccaacaggcctaattacattgcttttagggacaattttattggtctaatgtattacaacagcacgggtaatatgggtgttctggcgggccaagcatcgcagttgaatgctgttgtagatttgcaagacagaaacacagagctttcataccagcttttgcttgattccattggtgatagaaccaggtacttttctatgtggaatcaggctgttgacagctatgatccagatgttagaattattgaaaatcatggaactgaagatgaacttccaaattactgctttccactgggaggtgtgattaatacagagactcttaccaaggtaaaacctaaaacaggtcaggaaaatggatgggaaaaagatgctacagaattttcagataaaaatgaaataagagttggaaataattttgccatggaaatcaatctaaatgccaacctgtggagaaatttcctgtactccaacatagcgctgtatttgcccgacaagctaaagtacagtccttccaacgtaaaaatttctgataacccaaacacctacgactacatgaacaagcgagtggtggctcccgggctagtggactgctacattaaccttggagcacgctggtcccttgactatatggacaacgtcaacccatttaaccaccaccgcaatgctggcctgcgctaccgctcaatgttgctgggcaatggtcgctatgtgcccttccacatccaggtgcctcagaagttctttgccattaaaaacctccttctcctgccgggctcatacacctacgagtggaacttcaggaaggatgttaacatggttctgcagagctccctaggaaatgacctaagggttgacggagccagcattaagtttgatagcatttgcctttacgccaccttcttccccatggcccacaacaccgcctccacgcttgaggccatgcttagaaacgacaccaacgaccagtcctttaacgactatctctccgccgccaacatgctctaccctatacccgccaacgctaccaacgtgcccatatccatcccctcccgcaactgggcggctttccgcggctgggccttcacgcgccttaagactaaggaaaccccatcactgggctcgggctacgacccttattacacctactctggctctataccctacctagatggaaccttttacctcaaccacacctttaagaaggtggccattacctttgactcttctgtcagctggcctggcaatgaccgcctgcttacccccaacgagtttgaaattaagcgctcagttgacggggagggttacaacgttgcccagtgtaacatgaccaaagactggttcctggtacaaatgctagctaactataacattggctaccagggcttctatatcccagagagctacaaggaccgcatgtactccttctttagaaacttccagcccatgagccgtcaggtggtggatgatactaaatacaaggactaccaacaggtgggcatcctacaccaacacaacaactctggatttgttggctaccttgcccccaccatgcgcgaaggacaggcctaccctgctaacttcccctatccgcttataggcaagaccgcagttgacagcattacccagaaaaagtttctttgcgatcgcaccctttggcgcatcccattctccagtaactttatgtccatgggcgcactcacagacctgggccaaaaccttctctacgccaactccgcccacgcgctagacatgacttttgaggtggatcccatggacgagcccacccttctttatgttttgtttgaagtctttgacgtggtccgtgtgcaccagccgcaccgcggcgtcatcgaaaccgtgtacctgcgcacgcccttctcggccggcaacgccacaacataaagaagcaagcaacatcaacaacagctgccgccatgggctccagtgagcaggaactgaaagccattgtcaaagatcttggttgtgggccatattttttgggcacctatgacaagcgctttccaggctttgtttctccacacaagctcgcctgcgccatagtcaatacggccggtcgcgagactgggggcgtacactggatggcctttgcctggaacccgcactcaaaaacatgctacctctttgagccctttggcttttctgaccagcgactcaagcaggtttaccagtttgagtacgagtcactcctgcgccgtagcgccattgcttcttcccccgaccgctgtataacgctggaaaagtccacccaaagcgtacaggggcccaactcggccgcctgtggactattctgctgcatgtttctccacgcctttgccaactggccccaaactcccatggatcacaaccccaccatgaaccttattaccggggtacccaactccatgctcaacagtccccaggtacagcccaccctgcgtcgcaaccaggaacagctctacagcttcctggagcgccactcgccctacttccgcagccacagtgcgcagattaggagcgccacttctttttgtcacttgaaaaacatgtaaaaataatgtactagagacactttcaataaaggcaaatgcttttatttgtacactctcgggtgattatttacccccacccttgccgtctgcgccgtttaaaaatcaaaggggttctgccgcgcatcgctatgcgccactggcagggacacgttgcgatactggtgtttagtgctccacttaaactcaggcacaaccatccgcggcagctcggtgaagttttcactccacaggctgcgcaccatcaccaacgcgtttagcaggtcgggcgccgatatcttgaagtcgcagttggggcctccgccctgcgcgcgcgagttgcgatacacagggttgcagcactggaacactatcagcgccgggtggtgcacgctggccagcacgctcttgtcggagatcagatccgcgtccaggtcctccgcgttgctcagggcgaacggagtcaactttggtagctgccttcccaaaaagggcgcgtgcccaggctttgagttgcactcgcaccgtagtggcatcaaaaggtgaccgtgcccggtctgggcgttaggatacagcgcctgcataaaagccttgatctgcttaaaagccacctgagcctttgcgccttcagagaagaacatgccgcaagacttgccggaaaactgattggccggacaggccgcgtcgtgcacgcagcaccttgcgtcggtgttggagatctgcaccacatttcggccccaccggttcttcacgatcttggccttgctagactgctccttcagcgcgcgctgcccgttttcgctcgtcacatccatttcaatcacgtgctccttatttatcataatgcttccgtgtagacacttaagctcgccttcgatctcagcgcagcggtgcagccacaacgcgcagcccgtgggctcgtgatgcttgtaggtcacctctgcaaacgactgcaggtacgcctgcaggaatcgccccatcatcgtcacaaaggtcttgttgctggtgaaggtcagctgcaacccgcggtgctcctcgttcagccaggtcttgcatacggccgccagagcttccacttggtcaggcagtagtttgaagttcgcctttagatcgttatccacgtggtacttgtccatcagcgcgcgcgcagcctccatgcccttctcccacgcagacacgatcggcacactcagcgggttcatcaccgtaatttcactttccgcttcgctgggctcttcctcttcctcttgcgtccgcataccacgcgccactgggtcgtcttcattcagccgccgcactgtgcgcttacctcctttgccatgcttgattagcaccggtgggttgctgaaacccaccatttgtagcgccacatcttctctttcttcctcgctgtccacgattacctctggtgatggcgggcgctcgggcttgggagaagggcgcttctttttcttcttgggcgcaatggccaaatccgccgccgaggtcgatggccgcgggctgggtgtgcgcggcaccagcgcgtcttgtgatgagtcttcctcgtcctcggactcgatacgccgcctcatccgcttttttgggggcgcccggggaggcggcggcgacggggacggggacgacacgtcctccatggttgggggacgtcgcgccgcaccgcgtccgcgctcgggggtggtttcgcgctgctcctcttcccgactggccatttccttctcctataggcagaaaaagatcatggagtcagtcgagaagaaggacagcctaaccgccccctctgagttcgccaccaccgcctccaccgatgccgccaacgcgcctaccaccttccccgtcgaggcacccccgcttgaggaggaggaagtgattatcgagcaggacccaggttttgtaagcgaagacgacgaggaccgctcagtaccaacagaggataaaaagcaagaccaggacaacgcagaggcaaacgaggaacaagtcgggcggggggacgaaaggcatggcgactacctagatgtgggagacgacgtgctgttgaagcatctgcagcgccagtgcgccattatctgcgacgcgttgcaagagcgcagcgatgtgcccctcgccatagcggatgtcagccttgcctacgaacgccacctattctcaccgcgcgtaccccccaaacgccaagaaaacggcacatgcgagcccaacccgcgcctcaacttctaccccgtatttgccgtgccagaggtgcttgccacctatcacatctttttccaaaactgcaagatacccctatcctgccgtgccaaccgcagccgagcggacaagcagctggccttgcggcagggcgctgtcatacctgatatcgcctcgctcaacgaagtgccaaaaatctttgagggtcttggacgcgacgagaagcgcgcggcaaacgctctgcaacaggaaaacagcgaaaatgaaagtcactctggagtgttggtggaactcgagggtgacaacgcgcgcctagccgtactaaaacgcagcatcgaggtcacccactttgcctacccggcacttaacctaccccccaaggtcatgagcacagtcatgagtgagctgatcgtgcgccgtgcgcagcccctggagagggatgcaaatttgcaagaacaaacagaggagggcctacccgcagttggcgacgagcagctagcgcgctggcttcaaacgcgcgagcctgccgacttggaggagcgacgcaaactaatgatggccgcagtgctcgttaccgtggagcttgagtgcatgcagcggttctttgctgacccggagatgcagcgcaagctagaggaaacattgcactacacctttcgacagggctacgtacgccaggcctgcaagatctccaacgtggagctctgcaacctggtctcctaccttggaattttgcacgaaaaccgccttgggcaaaacgtgcttcattccacgctcaagggcgaggcgcgccgcgactacgtccgcgactgcgtttacttatttctatgctacacctggcagacggccatgggcgtttggcagcagtgcttggaggagtgcaacctcaaggagctgcagaaactgctaaagcaaaacttgaaggacctatggacggccttcaacgagcgctccgtggccgcgcacctggcggacatcattttccccgaacgcctgcttaaaaccctgcaacagggtctgccagacttcaccagtcaaagcatgttgcagaactttaggaactttatcctagagcgctcaggaatcttgcccgccacctgctgtgcacttcctagcgactttgtgcccattaagtaccgcgaatgccctccgccgctttggggccactgctaccttctgcagctagccaactaccttgcctaccactctgacataatggaagacgtgagcggtgacggtctactggagtgtcactgtcgctgcaacctatgcaccccgcaccgctccctggtttgcaattcgcagctgcttaacgaaagtcaaattatcggtacctttgagctgcagggtccctcgcctgacgaaaagtccgcggctccggggttgaaactcactccggggctgtggacgtcggcttaccttcgcaaatttgtacctgaggactaccacgcccacgagattaggttctacgaagaccaatcccgcccgcctaatgcggagcttaccgcctgcgtcattacccagggccacattcttggccaattgcaagccatcaacaaagcccgccaagagtttctgctacgaaagggacggggggtttacttggacccccagtccggcgaggagctcaacccaatccccccgccgccgcagccctatcagcagcagccgcgggcccttgcttcccaggatggcacccaaaaagaagctgcagctgccgccgccacccacggacgaggaggaatactgggacagtcaggcagaggaggttttggacgaggaggaggaggacatgatggaagactgggagagcctagacgaggaagcttccgaggtcgaagaggtgtcagacgaaacaccgtcaccctcggtcgcattcccctcgccggcgccccagaaatcggcaaccggttccagcatggctacaacctccgctcctcaggcgccgccggcactgcccgttcgccgacccaaccgtagatgggacaccactggaaccagggccggtaagtccaagcagccgccgccgttagcccaagagcaacaacagcgccaaggctaccgctcatggcgcgggcacaagaacgccatagttgcttgcttgcaagactgtgggggcaacatctccttcgcccgccgctttcttctctaccatcacggcgtggccttcccccgtaacatcctgcattactaccgtcatctctacagcccatactgcaccggcggcagcggcagcaacagcagcggccacacagaagcaaaggcgaccggatagcaagactctgacaaagcccaagaaatccacagcggcggcagcagcaggaggaggagcgctgcgtctggcgcccaacgaacccgtatcgacccgcgagcttagaaacaggatttttcccactctgtatgctatatttcaacagagcaggggccaagaacaagagctgaaaataaaaaacaggtctctgcgatccctcacccgcagctgcctgtatcacaaaagcgaagatcagcttcggcgcacgctggaagacgcggaggctctcttcagtaaatactgcgcgctgactcttaaggactagtttcgcgccctttctcaaatttaagcgcgaaaactacgtcatctccagcggccacacccggcgccagcacctgttgtcagcgccattatgagcaaggaaattcccacgccctacatgtggagttaccagccacaaatgggacttgcggctggagctgcccaagactactcaacccgaataaactacatgagcgcgggaccccacatgatatcccgggtcaacggaatacgcgcccaccgaaaccgaattctcctggaacaggcggctattaccaccacacctcgtaataaccttaatccccgtagttggcccgctgccctggtgtaccaggaaagtcccgctcccaccactgtggtacttcccagagacgcccaggccgaagttcagatgactaactcaggggcgcagcttgcgggcggctttcgtcacagggtgcggtcgcccgggcagggtataactcacctgacaatcagagggcgaggtattcagctcaacgacgagtcggtgagctcctcgcttggtctccgtccggacgggacatttcagatcggcggcgccggccgctcttcattcacgcctcgtcaggcaatcctaactctgcagacctcgtcctctgagccgcgctctggaggcattggaactctgcaatttattgaggagtttgtgccatcggtctactttaaccccttctcgggacctcccggccactatccggatcaatttattcctaactttgacgcggtaaaggactcggcggacggctacgactgaatgttaagtggagaggcagagcaactgcgcctgaaacacctggtccactgtcgccgccacaagtgctttgcccgcgactccggtgagttttgctactttgaattgcccgaggatcatatcgagggcccggcgcacggcgtccggcttaccgcccagggagagcttgcccgtagcctgattcgggagtttacccagcgccccctgctagttgagcgggacaggggaccctgtgttctcactgtgatttgcaactgtcctaaccctggattacatcaagatcctctagttaatgtcaggtcgcctaagtcgattaactagagtacccggggatcttattccctttaactaataaaaaaaaataataaagcatcacttacttaaaatcagttagcaaatttctgtccagtttattcagcagcacctccttgccctcctcccagctctggtattgcagcttcctcctggctgcaaactttctccacaatctaaatggaatgtcagtttcctcctgttcctgtccatccgcacccactatcttcatgttgttgcagatgaagcgcgcaagaccgtctgaagataccttcaaccccgtgtatccatatgacacggaaaccggtcctccaactgtgccttttcttactcctccctttgtatcccccaatgggtttcaagagagtccccctggggtactctctttgcgcctatccgaacctctagttacctccaatggcatgcttgcgctcaaaatgggcaacggcctctctctggacgaggccggcaaccttacctcccaaaatgtaaccactgtgagcccacctctcaaaaaaaccaagtcaaacataaacctggaaatatctgcacccctcacagttacctcagaagccctaactgtggctgccgccgcacctctaatggtcgcgggcaacacactcaccatgcaatcacaggccccgctaaccgtgcacgactccaaacttagcattgccacccaaggacccctcacagtgtcagaaggaaagctagccctgcaaacatcaggccccctcaccaccaccgatagcagtacccttactatcactgcctcaccccctctaactactgccactggtagcttgggcattgacttgaaagagcccatttatacacaaaatggaaaactaggactaaagtacggggctcctttgcatgtaacagacgacctaaacactttgaccgtagcaactggtccaggtgtgactattaataatacttccttgcaaactaaagttactggagccttgggttttgattcacaaggcaatatgcaacttaatgtagcaggaggactaaggattgattctcaaaacagacgccttatacttgatgttagttatccgtttgatgctcaaaaccaactaaatctaagactaggacagggccctctttttataaactcagcccacaacttggatattaactacaacaaaggcctttacttgtttacagcttcaaacaattccaaaaagcttgaggttaacctaagcactgccaaggggttgatgtttgacgctacagccatagccattaatgcaggagatgggcttgaatttggttcacctaatgcaccaaacacaaatcccctcaaaacaaaaattggccatggcctagaatttgattcaaacaaggctatggttcctaaactaggaactggccttagttttgacagcacaggtgccattacagtaggaaacaaaaataatgataagctaactttgtggaccggaataaaccctccacctaactgtcaaattgtggaaaacactaatacaaatgatggcaaacttactttagtattagtaaaaaatggagggcttgttaatggctacgtgtctctagttggtgtatcagacactgtgaaccaaatgttcacacaaaagacagcaaacatccaattaagattatattttgactcttctggaaatctattaactgaggaatcagacttaaaaattccacttaaaaataaatcttctacagcgaccagtgaaactgtagccagcagcaaagcctttatgccaagtactacagcttatcccttcaacaccactactagggatagtgaaaactacattcatggaatatgttactacatgactagttatgatagaagtctatttcccttgaacatttctataatgctaaacagccgtatgatttcttccaatgttgcctatgccatacaatttgaatggaatctaaatgcaagtgaatctccagaaagcaacatagctacgctgaccacatccccctttttcttttcttacattacagaagacgacaactaaagaatcgtttgtgttatgtttcaacgtgtttatttttcaattgcagaaaatttcaagtcatttttcattcagtagtatagccccaccaccacatagcttatacagatcaccgtaccttaatcaaacgtttttttttttattccaaaagattatccaaaacctcaaaatgaagatctattaagtgaacgcgctcccctccggtggcgtggtcaaactctacagccaaagaacagataatggcatttgtaagatgttgcacaatggcttccaaaaggcaaacggccctcacgtccaagtggacgtaaaggctaaacccttcagggtgaatctcctctataaacattccagcaccttcaaccatgcccaaataattctcatctcgccaccttctcaatatatctctaagcaaatcccgaatattaagtccggccattgtaaaaatctgctccagagcgccctccaccttcagcctcaagcagcgaatcatgattgcaaaaattcaggttcctcacagacctgtataagattcaaaagcggaacattaacaaaaataccgcgatcccgtaggtcccttcgcagggccagctgaacataatcgtgcaggtctgcacggaccagcgcggccacttccccgccaggaaccatgacaaaagaacccacactgattatgacacgcatactcggagctatgctaaccagcgtagccccgatgtaagcttgttgcatgggcggcgatataaaatgcaaggtgctgctcaaaaaatcaggcaaagcctcgcgcaaaaaagaaagcacatcgtagtcatgctcatgcagataaaggcaggtaagctccggaaccaccacagaaaaagacaccatttttctctcaaacatgtctgcgggtttctgcataaacacaaaataaaataacaaaaaaacatttaaacattagaagcctgtcttacaacaggaaaaacaacccttataagcataagacggactacggccatgccggcgtgaccgtaaaaaaactggtcaccgtgattaaaaagcaccaccgacagctcctcggtcatgtccggagtcataatgtaagactcggtaaacacatcaggttgattcacatcggtcagtgctaaaaagcgaccgaaatagcccgggggaatacatacccgcaggcgtagagacaacattacagcccccataggaggtataacaaaattaataggagagaaaaacacataaacacctgaaaaaccctcctgcctaggcaaaatagcaccctcccgctccagaacaacatacagcgcttccacagcggcagccataacagtcagccttaccagtaaaaaagaaaacctattaaaaaaacaccactcgacacggcaccagctcaatcagtcacagtgtaaaaaagggccaagtgcagagcgagtatatataggactaaaaaatgacgtaacggttaaagtccacaaaaaacacccagaaaaccgcacgcgaacctacgcccagaaacgaaagccaaaaaacccacaacttcctcaaatcgtcacttccgttttcccacgttacgtcacttcccattttaagaaaactacaattcccaacacatacaagttactccgccctaaaacctacgtcacccgccccgttcccacgccccgcgccacgtcacaaactccaccccctcattatcatattggcttcaatccaaaataaggtatattattgatgatg

SEQ ID NO: 11 - DNA, 35690 bp, Artificial Sequence
  Adk35R2-Spike/E4orf6-E4dlO4-7(E4re#6)
ttaattaacatcatcaataatataccttattttggattgaagccaatatgataatgagggggtggagtttgtgacgtggcgcggggcgtgggaacggggcgggtgacgtagtagtgtggcggaagtgtgatgttgcaagtgtggcggaacacatgtaagcgacggatgtggcaaaagtgacgtttttggtgtgcgccggtgtacacaggaagtgacaattttcgcgcggttttaggcggatgttgtagtaaatttgggcgtaaccgagtaagatttggccattttcgcgggaaaactgaataagaggaagtgaaatctgaataattttgtgttactcatagcgcgtaataatttcctcagaagccatagagcccaccgcatccccagcatgcctgctattgtcttcccaatcctcccccttgctgtcctgccccaccccaccccccagaatagaatgacacctactcagacaatgcgatgcaatttcctcattttattaggaaaggacagtgggagtggcaccttccagggtcaaggaaggcacgggggaggggcaaacaacagatggctggcaactagaaggcacagtcgaggctgatcagcgagctctagagaattgatccccaagcttctacatgggggtagagtcataatcgtgcatcaggatagggcggtggtgctgcagcagcgcgcgaataaactgctgccgccgccgctccgtcctgcaggaatacaacatggcagtggtctcctcagcgatgattcgcaccgcccgcagcataaggcgccttgtcctccgggcacagcagcgcaccctgatctcacttaaatcagcacagtaactgcagcacagcaccacaatattgttcaaaatcccacagtgcaaggcgctgtatccaaagctcatggcggggaccacagaacccacgtggccatcataccacaagcgcaggtagattaagtggcgacccctcataaacacgctggacataaacattacctcttttggcatgttgtaattcaccacctcccggtaccatataaacctctgattaaacatggcgccatccaccaccatcctaaaccagctggccaaaacctgcccgccggctatacactgcagggaaccgggactggaacaatgacagtggagagcccaggactcgtaaccatggatcatcatgctcgtcatgatatcaatgttggcacaacacaggcacacgtgcatacacttcctcaggattacaagctcctcccgcgttagaaccatatcccagggaacaacccattcctgaatcagcgtaaatcccacactgcagggaagacctcgcacgtaactcacgttgtgcattgtcaaagtgttacattcgggcagcagcggatgatcctccagtatggtagcgcgggtttctgtctcaaaaggaggtagacgatccctactgtacggagtgcgccgagacaaccgagatcgtgttggtcgtagtgtcatgccaaatggaacgccggacgtagtcatggtggccagcttggggtagttttcacgacaccttaaatggaagaaaaaaactttgaaccactgtctgaggcttgagaatgaaccaagatccaaactcaaaaagggcaaattccaaggagaattacatcaagtgccaagctggcctaacttcagtctccacccactcagtatggggaaactccatcgcataaaacccctccccccaacctaaagacgacgtactccaaaagctcgagaactaatcgaggtgcctggacggcgcccggtactccgtggagtcacatgaagcgacggctgaggacggaaaggcccttttcctttgtgtgggtgactcacccgcccgctctcccgagcgccgcgtcctccattttgagctccctgcagcagggccgggaagcggccatctttccgctcacgcaactggtgccgaccgggccagccttgccgcccagggcggggcgatacacggcggcgcgaggccaggcaccagagcaggccggccagcttgagactacccccgtccgattctcggtggccgcgctcgcaggccccgcctcgccgaacatgtgcgctgggacgcacgggccccgtcgccgcccgcggccccaaaaaccgaaataccagtgtgcagatcttggcccgcatttacaagactatcttgccagaaaaaaagcgtcgcagcaggtcatcaaaaattttaaatggctagagacttatcgaaagcagcgagacaggcgcgaaggtgccaccagattcgcacgcggcggccccagcgcccaggccaagcctcaactcaagcacgaggcgaaggggctccttaagcgcaaggcctcgaactctcccacccacttccaacccgaagctcgggatcaagaatcacgtactgcagccaggggcgtggaagtaattcaaggcacgcaagggccataacccgtaaagaggccaggcccgcgggaaccacacacggcacttacctgtgttctggcggcaaacccgttgcgaaaaagaacgttcacggcgactactgcacttatatacggttctcccccaccctcgggaaaaaggcggagccagtacacgacatcactttcccagtttaccccgcgccaccttctctaggcaccggttcaattgccgacccctccccccaacttctcggggactgtgggcgatgtgcgctctgcccactgacgggcaccggagcgatccgcgttaagatacattgatgagtttggacaaaccacaactagaatgcagtgaaaaaaatgctttatttgtgaaatttgtgatgctattgctttatttgtaaccattataagctgcaataaacaagttaacaacaacaattgcattcattttatgtttcaggttcagggggaggtgtgggaggttttttaaagcaagtaaaacctctacaaatgtggtatggctgattatgatcaattttcatggccacttgatgtattgttcatatttgcccagttcttggaggtcaatcagggactcattcaggttcttagccacctcattcagtctgtcaatctccttctggatgttcaccacagaggcattgatgccagagatgtctcccaggtccacatcagggctggtgtggttcttgaagtatttgtccagttcctccttgaaggagtccagttcaggttggagtgggtcatagactgtgttgttcacaatgccaatcaccacatcacagttgccagacacaaaggtgttgtctgtggtgataatctgtggttcatagaagttcctctgggtcacaaaccagtgggtgccattgctcacaaacactccctcccttggaaagtgagccttgccatcatggcagatggcaggggctgtggtgaagttcttctcctgggcaggcacataggtcacatgcaggaacaccactccatgaggggcagactgtggaaaactcatcaggtggtagcccttgccacagaagtccaccctcttgctttgtcccagcacacactcactcatcttggtggcagccaggttggcagatgccctaatctcagcagccctgataagttgttgggtcacataggtttggagggattggagtctgcctgtaatcagtctgtcaatctggacctcagcctccaccttgtccagtctgctcaggatgtcattcagcacagaggagatggctccaaagttgctggaaagttgcttcaccagggtgttcagagcctgggcattctggttcaccacatcttggagtttgcccagggcagaggctgtgctggacagggagtcctgaatcttgccaatggcagagttgaactggttggcaatcagtttctggttctcatagagcacattctgggtcactccaatgccattgaacctgtaagccatctgcatagcaaatgggatttggagggctgctcctgctccaaaggtccagccagaggtgatggtgccagccagcagggcagaggtgtattgggcaatcatctcatctgtcagcagtggaggcagcactgtcagtccattgaacttctgggcacaaatcaggtccctggcagcaatgtctcccagacagtctccatattgcttgatgaagccagcatcagccagggtcaccttgttgaacagcaggtcctcaatgaaggacctcttgcttggcttgcttgggtcaggcagaatctggctgaagttgaagcctccaaagtccttgattggaggtgtcttgtaaatctgcttcacctgggcaaacacctcctgggtgttcttgtcctgttccacagcaatgcctgtcagagccctgttaagttgggtacagaaggagccatattggagcagcaggttgctacactctgtgctgtctccacagatatacattgtacagtccacagaggtcttggtcatactcacaggcagaatctctgtggtcacagagatggtgaagttggttgggatggcaatgctgttgttgctgtaagccacagagttctctgctcccagactcattgtgtaggcaatgatgctctggcttgccacagacctcgacccaccgccaccggtctgggtctggtaggaggcacagatgcctgctccaattgggatgtcacactcataggagttgttcacatgctctgctccaatcagacagccagccctggtctggaacacattgctgcctgtgctgtagaccctccaggttggtgtaagttggtcagcatggatagccacaggcacctcagtacagttcacatcctggtagagcacagccacctggttgctggtgttggtgccaggtgtaatcacagacactcctccaaaggaacatggtgtgatgtccagaatctccaaggtctgtgggtccctcacagcatctgtggtgtcagcaatgtccctgccaaactgttggaatggcaggaacttcttgttgctctctgtcagcactcctgtgcctgtcagtccattgaagttgaagttcacacacttgttcttcaccaggttggtgctcttctttggtccacacactgtggcaggggcatggagcagttcaaaggacagcaccaccaccctgtatggttggtagcccactccattggttggttggaagccataggattggagtggaaagtaacagttgaagccctccactccattacatggtgtgctgccagcctggtaaatctctgtgctgatgtccctctcaaatggtttcaggttgctcttcctgaacagtctgtagaggtagttgtagttgcctcccaccttgctgtccaggttgttgctgttccaggcaatcacacagcctgtgaagtcatcaggcagtttgtagttgtagtcagcaatcttgcctgtttgtccaggggcaatctgtctcacctcatctcccctaatcacaaaggagtcagcatagacattggtgaaacacaggtcattcagtttggttgggctcactccataacacttgaaggtgctgaaggaggcagagttgtagagcacagagtagtcagccacacagttgctaatcctcttcctgttccaggcatagacagaggcaaacctggtggcattgaacacctctccaaatggacacaggttggtgatgtttggaaacctcacaatgctctctgttggttggaccctgaagttgctggtctggtagatgcccttctccactgtgaaggatttcagggtacacttggtctcagacagtgggtccagggcacagtccacagcatctgtgatggtgccattctcattgtatttcagcaggaaggtccttggttggaggtagcccacatagtaggctgctgctcctgctgtccagccagaggaggagtctccaggtgtcaggtaggacctgtgcagagccagcagggtctggaacctggtgatgttgatgccaattggcaggtccaccagtggttccaaggcagagaagccctgtggcaggtccctcaccaggttgattggtgtgtgtttgctgtaaatcttgaagtagccatcaatgttcttgaacacaaactccctcaggttcttgaagttgccctgcttgccctccaagtccatcaggaatggttggctcacatattcaaaggtacagttgttggcagaggagtagaccctgaactcagactccatccaggacttgttgttcttgtggtagtagactcccaggaatgggtcattacagaactggaactcacacaccttaatcaccacattggtggcattgttcacaatcagcagggactgggtcttgctgtccagggtggtgccaaaaatccagcccctgatgatgttgctcttctctgtgctggcaaagtagactccatcattgaatggcagcacagggttgtcaaacctcttggtgccattggtgccagacacatggatggcatggaaccaggtcacattgctgaagaatggcaggaacaggtcctgggtgctgtgcagcacagaggacctgaacaccttgtcagggtagtagactcccctggtgaaggagttggtgtaggcaggaggaagttgggtcctggtggtcaggttcacacactggctggacaccagtggcagcagcaccaggaacacaaacatggtggcaaatcggaggctggatcggtcccggtgtcttctatggaggtcaaaacagcgtggatggcgtctccaggcgatctgacggttcactaaacgagctcgtcgacgatctctatcactgatagggagatctctatcactgatagggagagctctgcttatatagacctcccaccgtacacgcctaccgcccatttgcgtcaatggggcggagttgttacgacattttggaaagtcccgttgattttggtgccaaaacaaactcccattgacgtcaatggggtggagacttggaaatccccgtgagtcaaaccgctatccacgcccattgatgtactgccaaaaccgcatcaccatggtaatagcgatgactaatacgtagatgtactgccaagtaggaaagtcccataaggtcatgtactgggcataatgccaggcgggccatttaccgtcattgacgtcaatagggggcgtacttggcatatgatacacttgatgtactgccaagtgggcagtttaccgtaaatactccacccattgacgtcaatggaaagtccctattggcgttactatgggaacatacgtcattattgacgtcaatgggcgggggtcgttgggcggtcagccaggcgggccatttaccgtaagttatgtaacgcggaactccatatatgggctatgaactaatgaccccgtaattgattactattacagaaattgggcgtggcttaagggtgggaaagaatatataaggtgggggtcttatgtagttttgtatctgttttgcagcagccgccgccgccatgagcaccaactcgtttgatggaagcattgtgagctcatatttgacaacgcgcatgcccccatgggccggggtgcgtcagaatgtgatgggctccagcattgatggtcgccccgtcctgcccgcaaactctactaccttgacctacgagaccgtgtctggaacgccgttggagactgcagcctccgccgccgcttcagccgctgcagccaccgcccgcgggattgtgactgactttgctttcctgagcccgcttgcaagcagtgcagcttcccgttcatccgcccgcgatgacaagttgacggctcttttggcacaattggattctttgacccgggaacttaatgtcgtttctcagcagctgttggatctgcgccagcaggtttctgccctgaaggcttcctcccctcccaatgcggtttaaaacataaataaaaaaccagactctgtttggatttggatcaagcaagtgtcttgctgtctttatttaggggttttgcgcgcgcggtaggcccgggaccagcggtctcggtcgttgagggtcctgtgtattttttccaggacgtggtaaaggtgactctggatgttcagatacatgggcataagcccgtctctggggtggaggtagcaccactgcagagcttcatgctgcggggtggtgttgtagatgatccagtcgtagcaggagcgctgggcgtggtgcctaaaaatgtctttcagtagcaagctgattgccaggggcaggcccttggtgtaagtgtttacaaagcggttaagctgggatgggtgcatacgtggggatatgagatgcatcttggactgtatttttaggttggctatgttcccagccatatccctccggggattcatgttgtgcagaaccaccagcacagtgtatccggtgcacttgggaaatttgtcatgtagcttagaaggaaatgcgtggaagaacttggagacgcccttgtgacctccaagattttccatgcattcgtccataatgatggcaatgggcccacgggcggcggcctgggcgaagatatttctgggatcactaacgtcatagttgtgttccaggatgagatcgtcataggccatttttacaaagcgcgggcggagggtgccagactgcggtataatggttccatccggcccaggggcgtagttaccctcacagatttgcatttcccacgctttgagttcagatggggggatcatgtctacctgcggggcgatgaagaaaacggtttccggggtaggggagatcagctgggaagaaagcaggttcctgagcagctgcgacttaccgcagccggtgggcccgtaaatcacacctattaccgggtgcaactggtagttaagagagctgcagctgccgtcatccctgagcaggggggccacttcgttaagcatgtccctgactcgcatgttttccctgaccaaatccgccagaaggcgctcgccgcccagcgatagcagttcttgcaaggaagcaaagtttttcaacggtttgagaccgtccgccgtaggcatgcttttgagcgtttgaccaagcagttccaggcggtcccacagctcggtcacctgctctacggcatctcgatccagcatatctcctcgtttcgcgggttggggcggctttcgctgtacggcagtagtcggtgctcgtccagacgggccagggtcatgtctttccacgggcgcagggtcctcgtcagcgtagtctgggtcacggtgaaggggtgcgctccgggctgcgcgctggccagggtgcgcttgaggctggtcctgctggtgctgaagcgctgccggtcttcgccctgcgcgtcggccaggtagcatttgaccatggtgtcatagtccagcccctccgcggcgtggcccttggcgcgcagcttgcccttggaggaggcgccgcacgaggggcagtgcagacttttgagggcgtagagcttgggcgcgagaaataccgattccggggagtaggcatccgcgccgcaggccccgcagacggtctcgcattccacgagccaggtgagctctggccgttcggggtcaaaaaccaggtttcccccatgctttttgatgcgtttcttacctctggtttccatgagccggtgtccacgctcggtgacgaaaaggctgtccgtgtccccgtatacagacttgagaggcctgtcctcgagcggtgttccgcggtcctcctcgtatagaaactcggaccactctgagacaaaggctcgcgtccaggccagcacgaaggaggctaagtgggaggggtagcggtcgttgtccactagggggtccactcgctccagggtgtgaagacacatgtcgccctcttcggcatcaaggaaggtgattggtttgtaggtgtaggccacgtgaccgggtgttcctgaaggggggctataaaagggggtgggggcgcgttcgtcctcactctcttccgcatcgctgtctgcgagggccagctgttggggtgagtactccctctgaaaagcgggcatgacttctgcgctaagattgtcagtttccaaaaacgaggaggatttgatattcacctggcccgcggtgatgcctttgagggtggccgcatccatctggtcagaaaagacaatctttttgttgtcaagcttggtggcaaacgacccgtagagggcgttggacagcaacttggcgatggagcgcagggtttggtttttgtcgcgatcggcgcgctccttggccgcgatgtttagctgcacgtattcgcgcgcaacgcaccgccattcgggaaagacggtggtgcgctcgtcgggcaccaggtgcacgcgccaaccgcggttgtgcagggtgacaaggtcaacgctggtggctacctctccgcgtaggcgctcgttggtccagcagaggcggccgcccttgcgcgagcagaatggcggtagggggtctagctgcgtctcgtccggggggtctgcgtccacggtaaagaccccgggcagcaggcgcgcgtcgaagtagtctatcttgcatccttgcaagtctagcgcctgctgccatgcgcgggcggcaagcgcgcgctcgtatgggttgagtgggggaccccatggcatggggtgggtgagcgcggaggcgtacatgccgcaaatgtcgtaaacgtagaggggctctctgagtattccaagatatgtagggtagcatcttccaccgcggatgctggcgcgcacgtaatcgtatagttcgtgcgagggagcgaggaggtcgggaccgaggttgctacgggcgggctgctctgctcggaagactatctgcctgaagatggcatgtgagttggatgatatggttggacgctggaagacgttgaagctggcgtctgtgagacctaccgcgtcacgcacgaaggaggcgtaggagtcgcgcagcttgttgaccagctcggcggtgacctgcacgtctagggcgcagtagtccagggtttccttgatgatgtcatacttatcctgtcccttttttttccacagctcgcggttgaggacaaactcttcgcggtctttccagtactcttggatcggaaacccgtcggcctccgaacggtaagagcctagcatgtagaactggttgacggcctggtaggcgcagcatcccttttctacgggtagcgcgtatgcctgcgcggccttccggagcgaggtgtgggtgagcgcaaaggtgtccctgaccatgactttgaggtactggtatttgaagtcagtgtcgtcgcatccgccctgctcccagagcaaaaagtccgtgcgctttttggaacgcggatttggcagggcgaaggtgacatcgttgaagagtatctttcccgcgcgaggcataaagttgcgtgtgatgcggaagggtcccggcacctcggaacggttgttaattacctgggcggcgagcacgatctcgtcaaagccgttgatgttgtggcccacaatgtaaagttccaagaagcgcgggatgcccttgatggaaggcaattttttaagttcctcgtaggtgagctcttcaggggagctgagcccgtgctctgaaagggcccagtctgcaagatgagggttggaagcgacgaatgagctccacaggtcacgggccattagcatttgcaggtggtcgcgaaaggtcctaaactggcgacctatggccattttttctggggtgatgcagtagaaggtaagcgggtcttgttcccagcggtcccatccaaggttcgcggctaggtctcgcgcggcagtcactagaggctcatctccgccgaacttcatgaccagcatgaagggcacgagctgcttcccaaaggcccccatccaagtataggtctctacatcgtaggtgacaaagagacgctcggtgcgaggatgcgagccgatcgggaagaactggatctcccgccaccaattggaggagtggctattgatgtggtgaaagtagaagtccctgcgacgggccgaacactcgtgctggcttttgtaaaaacgtgcgcagtactggcagcggtgcacgggctgtacatcctgcacgaggttgacctgacgaccgcgcacaaggaagcagagtgggaatttgagcccctcgcctggcgggtttggctggtggtcttctacttcggctgcttgtccttgaccgtctggctgctcgaggggagttacggtggatcggaccaccacgccgcgcgagcccaaagtccagatgtccgcgcgcggcggtcggagcttgatgacaacatcgcgcagatgggagctgtccatggtctggagctcccgcggcgtcaggtcaggcgggagctcctgcaggtttacctcgcatagacgggtcagggcgcgggctagatccaggtgatacctaatttccaggggctggttggtggcggcgtcgatggcttgcaagaggccgcatccccgcggcgcgactacggtaccgcgcggcgggcggtgggccgcgggggtgtccttggatgatgcatctaaaagcggtgacgcgggcgagcccccggaggtagggggggctccggacccgccgggagagggggcaggggcacgtcggcgccgcgcgcgggcaggagctggtgctgcgcgcgtaggttgctggcgaacgcgacgacgcggcggttgatctcctgaatctggcgcctctgcgtgaagacgacgggcccggtgagcttgaacctgaaagagagttcgacagaatcaatttcggtgtcgttgacggcggcctggcgcaaaatctcctgcacgtctcctgagttgtcttgataggcgatctcggccatgaactgctcgatctcttcctcctggagatctccgcgtccggctcgctccacggtggcggcgaggtcgttggaaatgcgggccatgagctgcgagaaggcgttgaggcctccctcgttccagacgcggctgtagaccacgcccccttcggcatcgcgggcgcgcatgaccacctgcgcgagattgagctccacgtgccgggcgaagacggcgtagtttcgcaggcgctgaaagaggtagttgagggtggtggcggtgtgttctgccacgaagaagtacataacccagcgtcgcaacgtggattcgttgatatcccccaaggcctcaaggcgctccatggcctcgtagaagtccacggcgaagttgaaaaactgggagttgcgcgccgacacggttaactcctcctccagaagacggatgagctcggcgacagtgtcgcgcacctcgcgctcaaaggctacaggggcctcttcttcttcttcaatctcctcttccataagggcctccccttcttcttcttctggcggcggtgggggaggggggacacggcggcgacgacggcgcaccgggaggcggtcgacaaagcgctcgatcatctccccgcggcgacggcgcatggtctcggtgacggcgcggccgttctcgcgggggcgcagttggaagacgccgcccgtcatgtcccggttatgggttggcggggggctgccatgcggcagggatacggcgctaacgatgcatctcaacaattgttgtgtaggtactccgccgccgagggacctgagcgagtccgcatcgaccggatcggaaaacctctcgagaaaggcgtctaaccagtcacagtcgcaaggtaggctgagcaccgtggcgggcggcagcgggcggcggtcggggttgtttctggcggaggtgctgctgatgatgtaattaaagtaggcggtcttgagacggcggatggtcgacagaagcaccatgtccttgggtccggcctgctgaatgcgcaggcggtcggccatgccccaggcttcgttttgacatcggcgcaggtctttgtagtagtcttgcatgagcctttctaccggcacttcttcttctccttcctcttgtcctgcatctcttgcatctatcgctgcggcggcggcggagtttggccgtaggtggcgccctcttcctcccatgcgtgtgaccccgaagcccctcatcggctgaagcagggctaggtcggcgacaacgcgctcggctaatatggcctgctgcacctgcgtgagggtagactggaagtcatccatgtccacaaagcggtggtatgcgcccgtgttgatggtgtaagtgcagttggccataacggaccagttaacggtctggtgacccggctgcgagagctcggtgtacctgagacgcgagtaagccctcgagtcaaatacgtagtcgttgcaagtccgcaccaggtactggtatcccaccaaaaagtgcggcggcggctggcggtagaggggccagcgtagggtggccggggctccgggggcgagatcttccaacataaggcgatgatatccgtagatgtacctggacatccaggtgatgccggcggcggtggtggaggcgcgcggaaagtcgcggacgcggttccagatgttgcgcagcggcaaaaagtgctccatggtcgggacgctctggccggtcaggcgcgcgcaatcgttgacgctctagcgtgcaaaaggagagcctgtaagcgggcactcttccgtggtctggtggataaattcgcaagggtatcatggcggacgaccggggttcgagccccgtatccggccgtccgccgtgatccatgcggttaccgcccgcgtgtcgaacccaggtgtgcgacgtcagacaacgggggagtgctccttttggcttccttccaggcgcggcggctgctgcgctagcttttttggccactggccgcgcgcagcgtaagcggttaggctggaaagcgaaagcattaagtggctcgctccctgtagccggagggttattttccaagggttgagtcgcgggacccccggttcgagtctcggaccggccggactgcggcgaacgggggtttgcctccccgtcatgcaagaccccgcttgcaaattcctccggaaacagggacgagccccttttttgcttttcccagatgcatccggtgctgcggcagatgcgcccccctcctcagcagcggcaagagcaagagcagcggcagacatgcagggcaccctcccctcctcctaccgcgtcaggaggggcgacatccgcggttgacgcggcagcagatggtgattacgaacccccgcggcgccgggcccggcactacctggacttggaggagggcgagggcctggcgcggctaggagcgccctctcctgagcggcacccaagggtgcagctgaagcgtgatacgcgtgaggcgtacgtgccgcggcagaacctgtttcgcgaccgcgagggagaggagcccgaggagatgcgggatcgaaagttccacgcagggcgcgagctgcggcatggcctgaatcgcgagcggttgctgcgcgaggaggactttgagcccgacgcgcgaaccgggattagtcccgcgcgcgcacacgtggcggccgccgacctggtaaccgcatacgagcagacggtgaaccaggagattaactttcaaaaaagctttaacaaccacgtgcgtacgcttgtggcgcgcgaggaggtggctataggactgatgcatctgtgggactttgtaagcgcgctggagcaaaacccaaatagcaagccgctcatggcgcagctgttccttatagtgcagcacagcagggacaacgaggcattcagggatgcgctgctaaacatagtagagcccgagggccgctggctgctcgatttgataaacatcctgcagagcatagtggtgcaggagcgcagcttgagcctggctgacaaggtggccgccatcaactattccatgcttagcctgggcaagttttacgcccgcaagatataccataccccttacgttcccatagacaaggaggtaaagatcgaggggttctacatgcgcatggcgctgaaggtgcttaccttgagcgacgacctgggcgtttatcgcaacgagcgcatccacaaggccgtgagcgtgagccggcggcgcgagctcagcgaccgcgagctgatgcacagcctgcaaagggccctggctggcacgggcagcggcgatagagaggccgagtcctactttgacgcgggcgctgacctgcgctgggccccaagccgacgcgccctggaggcagctggggccggacctgggctggcggtggcacccgcgcgcgctggcaacgtcggcggcgtggaggaatatgacgaggacgatgagtacgagccagaggacggcgagtactaagcggtgatgtttctgatcagatgatgcaagacgcaacggacccggcggtgcgggcggcgctgcagagccagccgtccggccttaactccacggacgactggcgccaggtcatggaccgcatcatgtcgctgactgcgcgcaatcctgacgcgttccggcagcagccgcaggccaaccggctctccgcaattctggaagcggtggtcccggcgcgcgcaaaccccacgcacgagaaggtgctggcgatcgtaaacgcgctggccgaaaacagggccatccggcccgacgaggccggcctggtctacgacgcgctgcttcagcgcgtggctcgttacaacagcggcaacgtgcagaccaacctggaccggctggtgggggatgtgcgcgaggccgtggcgcagcgtgagcgcgcgcagcagcagggcaacctgggctccatggttgcactaaacgccttcctgagtacacagcccgccaacgtgccgcggggacaggaggactacaccaactttgtgagcgcactgcggctaatggtgactgagacaccgcaaagtgaggtgtaccagtctgggccagactattttttccagaccagtagacaaggcctgcagaccgtaaacctgagccaggctttcaaaaacttgcaggggctgtggggggtgcgggctcccacaggcgaccgcgcgaccgtgtctagcttgctgacgcccaactcgcgcctgttgctgctgctaatagcgcccttcacggacagtggcagcgtgtcccgggacacatacctaggtcacttgctgacactgtaccgcgaggccataggtcaggcgcatgtggacgagcatactttccaggagattacaagtgtcagccgcgcgctggggcaggaggacacgggcagcctggaggcaaccctaaactacctgctgaccaaccggcggcagaagatcccctcgttgcacagtttaaacagcgaggaggagcgcattttgcgctacgtgcagcagagcgtgagccttaacctgatgcgcgacggggtaacgcccagcgtggcgctggacatgaccgcgcgcaacatggaaccgggcatgtatgcctcaaaccggccgtttatcaaccgcctaatggactacttgcatcgcgcggccgccgtgaaccccgagtatttcaccaatgccatcttgaacccgcactggctaccgccccctggtttctacaccgggggattcgaggtgcccgagggtaacgatggattcctctgggacgacatagacgacagcgtgttttccccgcaaccgcagaccctgctagagttgcaacagcgcgagcaggcagaggcggcgctgcgaaaggaaagcttccgcaggccaagcagcttgtccgatctaggcgctgcggccccgcggtcagatgctagtagcccatttccaagcttgatagggtctcttaccagcactcgcaccacccgcccgcgcctgctgggcgaggaggagtacctaaacaactcgctgctgcagccgcagcgcgaaaaaaacctgcctccggcatttcccaacaacgggatagagagcctagtggacaagatgagtagatggaagacgtacgcgcaggagcacagggacgtgccaggcccgcgcccgcccacccgtcgtcaaaggcacgaccgtcagcggggtctggtgtgggaggacgatgactcggcagacgacagcagcgtcctggatttgggagggagtggcaacccgtttgcgcaccttcgccccaggctggggagaatgttttaaaaaaaaaaaagcatgatgcaaaataaaaaactcaccaaggccatggcaccgagcgttggttttcttgtattccccttagtatgcggcgcgcggcgatgtatgaggaaggtcctcctccctcctacgagagtgtggtgagcgcggcgccagtggcggcggcgctgggttctcccttcgatgctcccctggacccgccgtttgtgcctccgcggtacctgcggcctaccggggggagaaacagcatccgttactctgagttggcacccctattcgacaccacccgtgtgtacctggtggacaacaagtcaacggatgtggcatccctgaactaccagaacgaccacagcaactttctgaccacggtcattcaaaacaatgactacagcccgggggaggcaagcacacagaccatcaatcttgacgaccggtcgcactggggcggcgacctgaaaaccatcctgcataccaacatgccaaatgtgaacgagttcatgtttaccaataagtttaaggcgcgggtgatggtgtcgcgcttgcctactaaggacaatcaggtggagctgaaatacgagtgggtggagttcacgctgcccgagggcaactactccgagaccatgaccatagaccttatgaacaacgcgatcgtggagcactacttgaaagtgggcagacagaacggggttctggaaagcgacatcggggtaaagtttgacacccgcaacttcagactggggtttgaccccgtcactggtcttgtcatgcctggggtatatacaaacgaagccttccatccagacatcattttgctgccaggatgcggggtggacttcacccacagccgcctgagcaacttgttgggcatccgcaagcggcaacccttccaggagggctttaggatcacctacgatgatctggagggtggtaacattcccgcactgttggatgtggacgcctaccaggcgagcttgaaagatgacaccgaacagggcgggggtggcgcaggcggcagcaacagcagtggcagcggcgcggaagagaactccaacgcggcagccgcggcaatgcagccggtggaggacatgaacgatcatgccattcgcggcgacacctttgccacacgggctgaggagaagcgcgctgaggccgaagcagcggccgaagctgccgcccccgctgcgcaacccgaggtcgagaagcctcagaagaaaccggtgatcaaacccctgacagaggacagcaagaaacgcagttacaacctaataagcaatgacagcaccttcacccagtaccgcagctggtaccttgcatacaactacggcgaccctcagaccggaatccgctcatggaccctgctttgcactcctgacgtaacctgcggctcggagcaggtctactggtcgttgccagacatgatgcaagaccccgtgaccttccgctccacgcgccagatcagcaactttccggtggtgggcgccgagctgttgcccgtgcactccaagagcttctacaacgaccaggccgtctactcccaactcatccgccagtttacctctctgacccacgtgttcaatcgctttcccgagaaccagattttggcgcgcccgccagcccccaccatcaccaccgtcagtgaaaacgttcctgctctcacagatcacgggacgctaccgctgcgcaacagcatcggaggagtccagcgagtgaccattactgacgccagacgccgcacctgcccctacgtttacaaggccctgggcatagtctcgccgcgcgtcctatcgagccgcactttttgagcaagcatgtccatccttatatcgcccagcaataacacaggctggggcctgcgcttcccaagcaagatgtttggcggggccaagaagcgctccgaccaacacccagtgcgcgtgcgcgggcactaccgcgcgccctggggcgcgcacaaacgcggccgcactgggcgcaccaccgtcgatgacgccatcgacgcggtggtggaggaggcgcgcaactacacgcccacgccgccaccagtgtccacagtggacgcggccattcagaccgtggtgcgcggagcccggcgctatgctaaaatgaagagacggcggaggcgcgtagcacgtcgccaccgccgccgacccggcactgccgcccaacgcgcggcggcggccctgcttaaccgcgcacgtcgcaccggccgacgggcggccatgcgggccgctcgaaggctggccgcgggtattgtcactgtgccccccaggtccaggcgacgagcggccgccgcagcagccgcggccattagtgctatgactcagggtcgcaggggcaacgtgtattgggtgcgcgactcggttagcggcctgcgcgtgcccgtgcgcacccgccccccgcgcaactagattgcaagaaaaaactacttagactcgtactgttgtatgtatccagcggcggcggcgcgcaacgaagctatgtccaagcgcaaaatcaaagaagagatgctccaggtcatcgcgccggagatctatggccccccgaagaaggaagagcaggattacaagccccgaaagctaaagcgggtcaaaaagaaaaagaaagatgatgatgatgaacttgacgacgaggtggaactgctgcacgctaccgcgcccaggcgacgggtacagtggaaaggtcgacgcgtaaaacgtgttttgcgacccggcaccaccgtagtctttacgcccggtgagcgctccacccgcacctacaagcgcgtgtatgatgaggtgtacggcgacgaggacctgcttgagcaggccaacgagcgcctcggggagtttgcctacggaaagcggcataaggacatgctggcgttgccgctggacgagggcaacccaacacctagcctaaagcccgtaacactgcagcaggtgctgcccgcgcttgcaccgtccgaagaaaagcgcggcctaaagcgcgagtctggtgacttggcacccaccgtgcagctgatggtacccaagcgccagcgactggaagatgtcttggaaaaaatgaccgtggaacctgggctggagcccgaggtccgcgtgcggccaatcaagcaggtggcgccgggactgggcgtgcagaccgtggacgttcagatacccactaccagtagcaccagtattgccaccgccacagagggcatggagacacaaacgtccccggttgcctcagcggtggcggatgccgcggtgcaggcggtcgctgcggccgcgtccaagacctctacggaggtgcaaacggacccgtggatgtttcgcgtttcagccccccggcgcccgcgccgttcgaggaagtacggcgccgccagcgcgctactgcccgaatatgccctacatccttccattgcgcctacccccggctatcgtggctacacctaccgccccagaagacgagcaactacccgacgccgaaccaccactggaacccgccgccgccgtcgccgtcgccagcccgtgctggccccgatttccgtgcgcagggtggctcgcgaaggaggcaggaccctggtgctgccaacagcgcgctaccaccccagcatcgtttaaaagccggtctttgtggttcttgcagatatggccctcacctgccgcctccgtttcccggtgccgggattccgaggaagaatgcaccgtaggaggggcatggccggccacggcctgacgggcggcatgcgtcgtgcgcaccaccggcggcggcgcgcgtcgcaccgtcgcatgcgcggcggtatcctgcccctccttattccactgatcgccgcggcgattggcgccgtgcccggaattgcatccgtggccttgcaggcgcagagacactgattaaaaacaagttgcatgtggaaaaatcaaaataaaaagtctggactctcacgctcgcttggtcctgtaactattttgtagaatggaagacatcaactttgcgtctctggccccgcgacacggctcgcgcccgttcatgggaaactggcaagatatcggcaccagcaatatgagcggtggcgccttcagctggggctcgctgtggagcggcattaaaaatttcggttccaccgttaagaactatggcagcaaggcctggaacagcagcacaggccagatgctgagggataagttgaaagagcaaaatttccaacaaaaggtggtagatggcctggcctctggcattagcggggtggtggacctggccaaccaggcagtgcaaaataagattaacagtaagcttgatccccgccctcccgtagaggagcctccaccggccgtggagacagtgtctccagaggggcgtggcgaaaagcgtccgcgccccgacagggaagaaactctggtgacgcaaatagacgagcctccctcgtacgaggaggcactaaagcaaggcctgcccaccacccgtcccatcgcgcccatggctaccggagtgctgggccagcacacacccgtaacgctggacctgcctccccccgccgacacccagcagaaacctgtgctgccaggcccgaccgccgttgttgtaacccgtcctagccgcgcgtccctgcgccgcgccgccagcggtccgcgatcgttgcggcccgtagccagtggcaactggcaaagcacactgaacagcatcgtgggtctgggggtgcaatccctgaagcgccgacgatgcttctgatagctaacgtgtcgtatgtgtgtcatgtatgcgtccatgtcgccgccagaggagctgctgagccgccgcgcgcccgctttccaagatggctaccccttcgatgatgccgcagtggtcttacatgcacatctcgggccaggacgcctcggagtacctgagccccgggctggtgcagtttgcccgcgccaccgagacgtacttcagcctgaataacaagtttagaaaccccacggtggcgcctacgcacgacgtgaccacagaccggtcccagcgtttgacgctgcggttcatccctgtggaccgtgaggatactgcgtactcgtacaaggcgcggttcaccctagctgtgggtgataaccgtgtgctggacatggcttccacgtactttgacatccgcggcgtgctggacaggggccctacttttaagccctactctggcactgcctacaacgccctggctcccaagggtgccccaaatccttgcgaatgggatgaagctgctactgctcttgaaataaacctagaagaagaggacgatgacaacgaagacgaagtagacgagcaagctgagcagcaaaaaactcacgtatttgggcaggcgccttattctggtataaatattacaaaggagggtattcaaataggtgtcgaaggtcaaacacctaaatatgccgataaaacatttcaacctgaacctcaaataggagaatctcagtggtacgaaacagaaattaatcatgcagctgggagagtcctaaaaaagactaccccaatgaaaccatgttacggttcatatgcaaaacccacaaatgaaaatggagggcaaggcattcttgtaaagcaacaaaatggaaagctagaaagtcaagtggaaatgcaatttttctcaactactgaggcagccgcaggcaatggtgataacttgactcctaaagtggtattgtacagtgaagatgtagatatagaaaccccagacactcatatttcttacatgcccactattaaggaaggtaactcacgagaactaatgggccaacaatctatgcccaacaggcctaattacattgcttttagggacaattttattggtctaatgtattacaacagcacgggtaatatgggtgttctggcgggccaagcatcgcagttgaatgctgttgtagatttgcaagacagaaacacagagctttcataccagcttttgcttgattccattggtgatagaaccaggtacttttctatgtggaatcaggctgttgacagctatgatccagatgttagaattattgaaaatcatggaactgaagatgaacttccaaattactgctttccactgggaggtgtgattaatacagagactcttaccaaggtaaaacctaaaacaggtcaggaaaatggatgggaaaaagatgctacagaattttcagataaaaatgaaataagagttggaaataattttgccatggaaatcaatctaaatgccaacctgtggagaaatttcctgtactccaacatagcgctgtatttgcccgacaagctaaagtacagtccttccaacgtaaaaatttctgataacccaaacacctacgactacatgaacaagcgagtggtggctcccgggctagtggactgctacattaaccttggagcacgctggtcccttgactatatggacaacgtcaacccatttaaccaccaccgcaatgctggcctgcgctaccgctcaatgttgctgggcaatggtcgctatgtgcccttccacatccaggtgcctcagaagttctttgccattaaaaacctccttctcctgccgggctcatacacctacgagtggaacttcaggaaggatgttaacatggttctgcagagctccctaggaaatgacctaagggttgacggagccagcattaagtttgatagcatttgcctttacgccaccttcttccccatggcccacaacaccgcctccacgcttgaggccatgcttagaaacgacaccaacgaccagtcctttaacgactatctctccgccgccaacatgctctaccctatacccgccaacgctaccaacgtgcccatatccatcccctcccgcaactgggcggctttccgcggctgggccttcacgcgccttaagactaaggaaaccccatcactgggctcgggctacgacccttattacacctactctggctctataccctacctagatggaaccttttacctcaaccacacctttaagaaggtggccattacctttgactcttctgtcagctggcctggcaatgaccgcctgcttacccccaacgagtttgaaattaagcgctcagttgacggggagggttacaacgttgcccagtgtaacatgaccaaagactggttcctggtacaaatgctagctaactataacattggctaccagggcttctatatcccagagagctacaaggaccgcatgtactccttctttagaaacttccagcccatgagccgtcaggtggtggatgatactaaatacaaggactaccaacaggtgggcatcctacaccaacacaacaactctggatttgttggctaccttgcccccaccatgcgcgaaggacaggcctaccctgctaacttcccctatccgcttataggcaagaccgcagttgacagcattacccagaaaaagtttctttgcgatcgcaccctttggcgcatcccattctccagtaactttatgtccatgggcgcactcacagacctgggccaaaaccttctctacgccaactccgcccacgcgctagacatgacttttgaggtggatcccatggacgagcccacccttctttatgttttgtttgaagtctttgacgtggtccgtgtgcaccagccgcaccgcggcgtcatcgaaaccgtgtacctgcgcacgcccttctcggccggcaacgccacaacataaagaagcaagcaacatcaacaacagctgccgccatgggctccagtgagcaggaactgaaagccattgtcaaagatcttggttgtgggccatattttttgggcacctatgacaagcgctttccaggctttgtttctccacacaagctcgcctgcgccatagtcaatacggccggtcgcgagactgggggcgtacactggatggcctttgcctggaacccgcactcaaaaacatgctacctctttgagccctttggcttttctgaccagcgactcaagcaggtttaccagtttgagtacgagtcactcctgcgccgtagcgccattgcttcttcccccgaccgctgtataacgctggaaaagtccacccaaagcgtacaggggcccaactcggccgcctgtggactattctgctgcatgtttctccacgcctttgccaactggccccaaactcccatggatcacaaccccaccatgaaccttattaccggggtacccaactccatgctcaacagtccccaggtacagcccaccctgcgtcgcaaccaggaacagctctacagcttcctggagcgccactcgccctacttccgcagccacagtgcgcagattaggagcgccacttctttttgtcacttgaaaaacatgtaaaaataatgtactagagacactttcaataaaggcaaatgcttttatttgtacactctcgggtgattatttacccccacccttgccgtctgcgccgtttaaaaatcaaaggggttctgccgcgcatcgctatgcgccactggcagggacacgttgcgatactggtgtttagtgctccacttaaactcaggcacaaccatccgcggcagctcggtgaagttttcactccacaggctgcgcaccatcaccaacgcgtttagcaggtcgggcgccgatatcttgaagtcgcagttggggcctccgccctgcgcgcgcgagttgcgatacacagggttgcagcactggaacactatcagcgccgggtggtgcacgctggccagcacgctcttgtcggagatcagatccgcgtccaggtcctccgcgttgctcagggcgaacggagtcaactttggtagctgccttcccaaaaagggcgcgtgcccaggctttgagttgcactcgcaccgtagtggcatcaaaaggtgaccgtgcccggtctgggcgttaggatacagcgcctgcataaaagccttgatctgcttaaaagccacctgagcctttgcgccttcagagaagaacatgccgcaagacttgccggaaaactgattggccggacaggccgcgtcgtgcacgcagcaccttgcgtcggtgttggagatctgcaccacatttcggccccaccggttcttcacgatcttggccttgctagactgctccttcagcgcgcgctgcccgttttcgctcgtcacatccatttcaatcacgtgctccttatttatcataatgcttccgtgtagacacttaagctcgccttcgatctcagcgcagcggtgcagccacaacgcgcagcccgtgggctcgtgatgcttgtaggtcacctctgcaaacgactgcaggtacgcctgcaggaatcgccccatcatcgtcacaaaggtcttgttgctggtgaaggtcagctgcaacccgcggtgctcctcgttcagccaggtcttgcatacggccgccagagcttccacttggtcaggcagtagtttgaagttcgcctttagatcgttatccacgtggtacttgtccatcagcgcgcgcgcagcctccatgcccttctcccacgcagacacgatcggcacactcagcgggttcatcaccgtaatttcactttccgcttcgctgggctcttcctcttcctcttgcgtccgcataccacgcgccactgggtcgtcttcattcagccgccgcactgtgcgcttacctcctttgccatgcttgattagcaccggtgggttgctgaaacccaccatttgtagcgccacatcttctctttcttcctcgctgtccacgattacctctggtgatggcgggcgctcgggcttgggagaagggcgcttctttttcttcttgggcgcaatggccaaatccgccgccgaggtcgatggccgcgggctgggtgtgcgcggcaccagcgcgtcttgtgatgagtcttcctcgtcctcggactcgatacgccgcctcatccgcttttttgggggcgcccggggaggcggcggcgacggggacggggacgacacgtcctccatggttgggggacgtcgcgccgcaccgcgtccgcgctcgggggtggtttcgcgctgctcctcttcccgactggccatttccttctcctataggcagaaaaagatcatggagtcagtcgagaagaaggacagcctaaccgccccctctgagttcgccaccaccgcctccaccgatgccgccaacgcgcctaccaccttccccgtcgaggcacccccgcttgaggaggaggaagtgattatcgagcaggacccaggttttgtaagcgaagacgacgaggaccgctcagtaccaacagaggataaaaagcaagaccaggacaacgcagaggcaaacgaggaacaagtcgggcggggggacgaaaggcatggcgactacctagatgtgggagacgacgtgctgttgaagcatctgcagcgccagtgcgccattatctgcgacgcgttgcaagagcgcagcgatgtgcccctcgccatagcggatgtcagccttgcctacgaacgccacctattctcaccgcgcgtaccccccaaacgccaagaaaacggcacatgcgagcccaacccgcgcctcaacttctaccccgtatttgccgtgccagaggtgcttgccacctatcacatctttttccaaaactgcaagatacccctatcctgccgtgccaaccgcagccgagcggacaagcagctggccttgcggcagggcgctgtcatacctgatatcgcctcgctcaacgaagtgccaaaaatctttgagggtcttggacgcgacgagaagcgcgcggcaaacgctctgcaacaggaaaacagcgaaaatgaaagtcactctggagtgttggtggaactcgagggtgacaacgcgcgcctagccgtactaaaacgcagcatcgaggtcacccactttgcctacccggcacttaacctaccccccaaggtcatgagcacagtcatgagtgagctgatcgtgcgccgtgcgcagcccctggagagggatgcaaatttgcaagaacaaacagaggagggcctacccgcagttggcgacgagcagctagcgcgctggcttcaaacgcgcgagcctgccgacttggaggagcgacgcaaactaatgatggccgcagtgctcgttaccgtggagcttgagtgcatgcagcggttctttgctgacccggagatgcagcgcaagctagaggaaacattgcactacacctttcgacagggctacgtacgccaggcctgcaagatctccaacgtggagctctgcaacctggtctcctaccttggaattttgcacgaaaaccgccttgggcaaaacgtgcttcattccacgctcaagggcgaggcgcgccgcgactacgtccgcgactgcgtttacttatttctatgctacacctggcagacggccatgggcgtttggcagcagtgcttggaggagtgcaacctcaaggagctgcagaaactgctaaagcaaaacttgaaggacctatggacggccttcaacgagcgctccgtggccgcgcacctggcggacatcattttccccgaacgcctgcttaaaaccctgcaacagggtctgccagacttcaccagtcaaagcatgttgcagaactttaggaactttatcctagagcgctcaggaatcttgcccgccacctgctgtgcacttcctagcgactttgtgcccattaagtaccgcgaatgccctccgccgctttggggccactgctaccttctgcagctagccaactaccttgcctaccactctgacataatggaagacgtgagcggtgacggtctactggagtgtcactgtcgctgcaacctatgcaccccgcaccgctccctggtttgcaattcgcagctgcttaacgaaagtcaaattatcggtacctttgagctgcagggtccctcgcctgacgaaaagtccgcggctccggggttgaaactcactccggggctgtggacgtcggcttaccttcgcaaatttgtacctgaggactaccacgcccacgagattaggttctacgaagaccaatcccgcccgcctaatgcggagcttaccgcctgcgtcattacccagggccacattcttggccaattgcaagccatcaacaaagcccgccaagagtttctgctacgaaagggacggggggtttacttggacccccagtccggcgaggagctcaacccaatccccccgccgccgcagccctatcagcagcagccgcgggcccttgcttcccaggatggcacccaaaaagaagctgcagctgccgccgccacccacggacgaggaggaatactgggacagtcaggcagaggaggttttggacgaggaggaggaggacatgatggaagactgggagagcctagacgaggaagcttccgaggtcgaagaggtgtcagacgaaacaccgtcaccctcggtcgcattcccctcgccggcgccccagaaatcggcaaccggttccagcatggctacaacctccgctcctcaggcgccgccggcactgcccgttcgccgacccaaccgtagatgggacaccactggaaccagggccggtaagtccaagcagccgccgccgttagcccaagagcaacaacagcgccaaggctaccgctcatggcgcgggcacaagaacgccatagttgcttgcttgcaagactgtgggggcaacatctccttcgcccgccgctttcttctctaccatcacggcgtggccttcccccgtaacatcctgcattactaccgtcatctctacagcccatactgcaccggcggcagcggcagcaacagcagcggccacacagaagcaaaggcgaccggatagcaagactctgacaaagcccaagaaatccacagcggcggcagcagcaggaggaggagcgctgcgtctggcgcccaacgaacccgtatcgacccgcgagcttagaaacaggatttttcccactctgtatgctatatttcaacagagcaggggccaagaacaagagctgaaaataaaaaacaggtctctgcgatccctcacccgcagctgcctgtatcacaaaagcgaagatcagcttcggcgcacgctggaagacgcggaggctctcttcagtaaatactgcgcgctgactcttaaggactagtttcgcgccctttctcaaatttaagcgcgaaaactacgtcatctccagcggccacacccggcgccagcacctgttgtcagcgccattatgagcaaggaaattcccacgccctacatgtggagttaccagccacaaatgggacttgcggctggagctgcccaagactactcaacccgaataaactacatgagcgcgggaccccacatgatatcccgggtcaacggaatacgcgcccaccgaaaccgaattctcctggaacaggcggctattaccaccacacctcgtaataaccttaatccccgtagttggcccgctgccctggtgtaccaggaaagtcccgctcccaccactgtggtacttcccagagacgcccaggccgaagttcagatgactaactcaggggcgcagcttgcgggcggctttcgtcacagggtgcggtcgcccgggcagggtataactcacctgacaatcagagggcgaggtattcagctcaacgacgagtcggtgagctcctcgcttggtctccgtccggacgggacatttcagatcggcggcgccggccgctcttcattcacgcctcgtcaggcaatcctaactctgcagacctcgtcctctgagccgcgctctggaggcattggaactctgcaatttattgaggagtttgtgccatcggtctactttaaccccttctcgggacctcccggccactatccggatcaatttattcctaactttgacgcggtaaaggactcggcggacggctacgactgaatgttaagtggagaggcagagcaactgcgcctgaaacacctggtccactgtcgccgccacaagtgctttgcccgcgactccggtgagttttgctactttgaattgcccgaggatcatatcgagggcccggcgcacggcgtccggcttaccgcccagggagagcttgcccgtagcctgattcgggagtttacccagcgccccctgctagttgagcgggacaggggaccctgtgttctcactgtgatttgcaactgtcctaaccctggattacatcaagatcctctagttaatgtcaggtcgcctaagtcgattaactagagtacccggggatcttattccctttaactaataaaaaaaaataataaagcatcacttacttaaaatcagttagcaaatttctgtccagtttattcagcagcacctccttgccctcctcccagctctggtattgcagcttcctcctggctgcaaactttctccacaatctaaatggaatgtcagtttcctcctgttcctgtccatccgcacccactatcttcatgttgttgcagatgaagcgcgcaagaccgtctgaagataccttcaaccccgtgtatccatatgacacggaaaccggtcctccaactgtgccttttcttactcctccctttgtatcccccaatgggtttcaagagagtccccctggggtactctctttgcgcctatccgaacctctagttacctccaatggcatgcttgcgctcaaaatgggcaacggcctctctctggacgaggccggcaaccttacctcccaaaatgtaaccactgtgagcccacctctcaaaaaaaccaagtcaaacataaacctggaaatatctgcacccctcacagttacctcagaagccctaactgtggctgccgccgcacctctaatggtcgcgggcaacacactcaccatgcaatcacaggccccgctaaccgtgcacgactccaaacttagcattgccacccaaggacccctcacagtgtcagaaggaaagctagccctgcaaacatcaggccccctcaccaccaccgatagcagtacccttactatcactgcctcaccccctctaactactgccactggtagcttgggcattgacttgaaagagcccatttatacacaaaatggaaaactaggactaaagtacggggctcctttgcatgtaacagacgacctaaacactttgaccgtagcaactggtccaggtgtgactattaataatacttccttgcaaactaaagttactggagccttgggttttgattcacaaggcaatatgcaacttaatgtagcaggaggactaaggattgattctcaaaacagacgccttatacttgatgttagttatccgtttgatgctcaaaaccaactaaatctaagactaggacagggccctctttttataaactcagcccacaacttggatattaactacaacaaaggcctttacttgtttacagcttcaaacaattccaaaaagcttgaggttaacctaagcactgccaaggggttgatgtttgacgctacagccatagccattaatgcaggagatgggcttgaatttggttcacctaatgcaccaaacacaaatcccctcaaaacaaaaattggccatggcctagaatttgattcaaacaaggctatggttcctaaactaggaactggccttagttttgacagcacaggtgccattacagtaggaaacaaaaataatgataagctaactttgtggaccggaataaaccctccacctaactgtcaaattgtggaaaacactaatacaaatgatggcaaacttactttagtattagtaaaaaatggagggcttgttaatggctacgtgtctctagttggtgtatcagacactgtgaaccaaatgttcacacaaaagacagcaaacatccaattaagattatattttgactcttctggaaatctattaactgaggaatcagacttaaaaattccacttaaaaataaatcttctacagcgaccagtgaaactgtagccagcagcaaagcctttatgccaagtactacagcttatcccttcaacaccactactagggatagtgaaaactacattcatggaatatgttactacatgactagttatgatagaagtctatttcccttgaacatttctataatgctaaacagccgtatgatttcttccaatgttgcctatgccatacaatttgaatggaatctaaatgcaagtgaatctccagaaagcaacatagctacgctgaccacatccccctttttcttttcttacattacagaagacgacaactaaagaatcgtttgtgttatgtttcaacgtgtttatttttcaattgcagaaaatttcaagtcatttttcattcagtagtatagccccaccaccacatagcttatacagatcaccgtaccttaatcaaacgtttttttttttattccaaaagattatccaaaacctcaaaatgaagatctattaagtgaacgcgctcccctccggtggcgtggtcaaactctacagccaaagaacagataatggcatttgtaagatgttgcacaatggcttccaaaaggcaaacggccctcacgtccaagtggacgtaaaggctaaacccttcagggtgaatctcctctataaacattccagcaccttcaaccatgcccaaataattctcatctcgccaccttctcaatatatctctaagcaaatcccgaatattaagtccggccattgtaaaaatctgctccagagcgccctccaccttcagcctcaagcagcgaatcatgattgcaaaaattcaggttcctcacagacctgtataagattcaaaagcggaacattaacaaaaataccgcgatcccgtaggtcccttcgcagggccagctgaacataatcgtgcaggtctgcacggaccagcgcggccacttccccgccaggaaccatgacaaaagaacccacactgattatgacacgcatactcggagctatgctaaccagcgtagccccgatgtaagcttgttgcatgggcggcgatataaaatgcaaggtgctgctcaaaaaatcaggcaaagcctcgcgcaaaaaagaaagcacatcgtagtcatgctcatgcagataaaggcaggtaagctccggaaccaccacagaaaaagacaccatttttctctcaaacatgtctgcgggtttctgcataaacacaaaataaaataacaaaaaaacatttaaacattagaagcctgtcttacaacaggaaaaacaacccttataagcataagacggactacggccatgccggcgtgaccgtaaaaaaactggtcaccgtgattaaaaagcaccaccgacagctcctcggtcatgtccggagtcataatgtaagactcggtaaacacatcaggttgattcacatcggtcagtgctaaaaagcgaccgaaatagcccgggggaatacatacccgcaggcgtagagacaacattacagcccccataggaggtataacaaaattaataggagagaaaaacacataaacacctgaaaaaccctcctgcctaggcaaaatagcaccctcccgctccagaacaacatacagcgcttccacagcggcagccataacagtcagccttaccagtaaaaaagaaaacctattaaaaaaacaccactcgacacggcaccagctcaatcagtcacagtgtaaaaaagggccaagtgcagagcgagtatatataggactaaaaaatgacgtaacggttaaagtccacaaaaaacacccagaaaaccgcacgcgaacctacgcccagaaacgaaagccaaaaaacccacaacttcctcaaatcgtcacttccgttttcccacgttacgtcacttcccattttaagaaaactacaattcccaacacatacaagttactccgccctaaaacctacgtcacccgccccgttcccacgccccgcgccacgtcacaaactccaccccctcattatcatattggcttcaatccaaaataaggtatattattgatgatg

SEQ ID NO: 12 - DNA, 35690 bp, Artificial Sequence
  Adk35F2-E4orf6/Spike-E4dlO4-7(E4re#7)
ttaattaacatcatcaataatataccttattttggattgaagccaatatgataatgagggggtggagtttgtgacgtggcgcggggcgtgggaacggggcgggtgacgtagtagtgtggcggaagtgtgatgttgcaagtgtggcggaacacatgtaagcgacggatgtggcaaaagtgacgtttttggtgtgcgccggtgtacacaggaagtgacaattttcgcgcggttttaggcggatgttgtagtaaatttgggcgtaaccgagtaagatttggccattttcgcgggaaaactgaataagaggaagtgaaatctgaataattttgtgttactcatagcgcgtaataatttgctccggtgcccgtcagtgggcagagcgcacatcgcccacagtccccgagaagttggggggaggggtcggcaattgaaccggtgcctagagaaggtggcgcggggtaaactgggaaagtgatgtcgtgtactggctccgcctttttcccgagggtgggggagaaccgtatataagtgcagtagtcgccgtgaacgttctttttcgcaacgggtttgccgccagaacacaggtaagtgccgtgtgtggttcccgcgggcctggcctctttacgggttatggcccttgcgtgccttgaattacttccacgcccctggctgcagtacgtgattcttgatcccgagcttcgggttggaagtgggtgggagagttcgaggccttgcgcttaaggagccccttcgcctcgtgcttgagttgaggcttggcctgggcgctggggccgccgcgtgcgaatctggtggcaccttcgcgcctgtctcgctgctttcgataagtctctagccatttaaaatttttgatgacctgctgcgacgctttttttctggcaagatagtcttgtaaatgcgggccaagatctgcacactggtatttcggtttttggggccgcgggcggcgacggggcccgtgcgtcccagcgcacatgttcggcgaggcggggcctgcgagcgcggccaccgagaatcggacgggggtagtctcaagctggccggcctgctctggtgcctggcctcgcgccgccgtgtatcgccccgccctgggcggcaaggctggcccggtcggcaccagttgcgtgagcggaaagatggccgcttcccggccctgctgcagggagctcaaaatggaggacgcggcgctcgggagagcgggcgggtgagtcacccacacaaaggaaaagggcctttccgtcctcagccgtcgcttcatgtgactccacggagtaccgggcgccgtccaggcacctcgattagttctcgagcttttggagtacgtcgtctttaggttggggggaggggttttatgcgatggagtttccccatactgagtgggtggagactgaagttaggccagcttggcacttgatgtaattctccttggaatttgccctttttgagtttggatcttggttcattctcaagcctcagacagtggttcaaagtttttttcttccatttaaggtgtcgtgaaaactaccccaagctggccaccatgactacgtccggcgttccatttggcatgacactacgaccaacacgatctcggttgtctcggcgcactccgtacagtagggatcgtctacctccttttgagacagaaacccgcgctaccatactggaggatcatccgctgctgcccgaatgtaacactttgacaatgcacaacgtgagttacgtgcgaggtcttccctgcagtgtgggatttacgctgattcaggaatgggttgttccctgggatatggttctaacgcgggaggagcttgtaatcctgaggaagtgtatgcacgtgtgcctgtgttgtgccaacattgatatcatgacgagcatgatgatccatggttacgagtcctgggctctccactgtcattgttccagtcccggttccctgcagtgtatagccggcgggcaggttttggccagctggtttaggatggtggtggatggcgccatgtttaatcagaggtttatatggtaccgggaggtggtgaattacaacatgccaaaagaggtaatgtttatgtccagcgtgtttatgaggggtcgccacttaatctacctgcgcttgtggtatgatggccacgtgggttctgtggtccccgccatgagctttggatacagcgccttgcactgtgggattttgaacaatattgtggtgctgtgctgcagttactgtgctgatttaagtgagatcagggtgcgctgctgtgcccggaggacaaggcgccttatgctgcgggcggtgcgaatcatcgctgaggagaccactgccatgttgtattcctgcaggacggagcggcggcggcagcagtttattcgcgcgctgctgcagcaccaccgccctatcctgatgcacgattatgactctacccccatgtagaagcttggggatcaattctctagagctcgctgatcagcctcgactgtgccttctagttgccagccatctgttgtttgcccctcccccgtgccttccttgaccctggaaggtgccactcccactgtcctttcctaataaaatgaggaaattgcatcgcattgtctgagtaggtgtcattctattctggggggtggggtggggcaggacagcaagggggaggattgggaagacaatagcaggcatgctggggatgcggtgggctctatggcttctgaggctgtaatagtaatcaattacggggtcattagttcatagcccatatatggagttccgcgttacataacttacggtaaatggcccgcctggctgaccgcccaacgacccccgcccattgacgtcaataatgacgtatgttcccatagtaacgccaatagggactttccattgacgtcaatgggtggagtatttacggtaaactgcccacttggcagtacatcaagtgtatcatatgccaagtacgccccctattgacgtcaatgacggtaaatggcccgcctggcattatgcccagtacatgaccttatgggactttcctacttggcagtacatctacgtattagtcatcgctattaccatggtgatgcggttttggcagtacatcaatgggcgtggatagcggtttgactcacggggatttccaagtctccaccccattgacgtcaatgggagtttgttttggcaccaaaatcaacgggactttccaaaatgtcgtaacaactccgccccattgacgcaaatgggcggtaggcgtgtacggtgggaggtctatataagcagagctctccctatcagtgatagagatctccctatcagtgatagagatcgtcgacgagctcgtttagtgaaccgtcagatcgcctggagacgccatccacgctgttttgacctccatagaagacaccgggaccgatccagcctccgatttgccaccatgtttgtgttcctggtgctgctgccactggtgtccagccagtgtgtgaacctgaccaccaggacccaacttcctcctgcctacaccaactccttcaccaggggagtctactaccctgacaaggtgttcaggtcctctgtgctgcacagcacccaggacctgttcctgccattcttcagcaatgtgacctggttccatgccatccatgtgtctggcaccaatggcaccaagaggtttgacaaccctgtgctgccattcaatgatggagtctactttgccagcacagagaagagcaacatcatcaggggctggatttttggcaccaccctggacagcaagacccagtccctgctgattgtgaacaatgccaccaatgtggtgattaaggtgtgtgagttccagttctgtaatgacccattcctgggagtctactaccacaagaacaacaagtcctggatggagtctgagttcagggtctactcctctgccaacaactgtacctttgaatatgtgagccaaccattcctgatggacttggagggcaagcagggcaacttcaagaacctgagggagtttgtgttcaagaacattgatggctacttcaagatttacagcaaacacacaccaatcaacctggtgagggacctgccacagggcttctctgccttggaaccactggtggacctgccaattggcatcaacatcaccaggttccagaccctgctggctctgcacaggtcctacctgacacctggagactcctcctctggctggacagcaggagcagcagcctactatgtgggctacctccaaccaaggaccttcctgctgaaatacaatgagaatggcaccatcacagatgctgtggactgtgccctggacccactgtctgagaccaagtgtaccctgaaatccttcacagtggagaagggcatctaccagaccagcaacttcagggtccaaccaacagagagcattgtgaggtttccaaacatcaccaacctgtgtccatttggagaggtgttcaatgccaccaggtttgcctctgtctatgcctggaacaggaagaggattagcaactgtgtggctgactactctgtgctctacaactctgcctccttcagcaccttcaagtgttatggagtgagcccaaccaaactgaatgacctgtgtttcaccaatgtctatgctgactcctttgtgattaggggagatgaggtgagacagattgcccctggacaaacaggcaagattgctgactacaactacaaactgcctgatgacttcacaggctgtgtgattgcctggaacagcaacaacctggacagcaaggtgggaggcaactacaactacctctacagactgttcaggaagagcaacctgaaaccatttgagagggacatcagcacagagatttaccaggctggcagcacaccatgtaatggagtggagggcttcaactgttactttccactccaatcctatggcttccaaccaaccaatggagtgggctaccaaccatacagggtggtggtgctgtcctttgaactgctccatgcccctgccacagtgtgtggaccaaagaagagcaccaacctggtgaagaacaagtgtgtgaacttcaacttcaatggactgacaggcacaggagtgctgacagagagcaacaagaagttcctgccattccaacagtttggcagggacattgctgacaccacagatgctgtgagggacccacagaccttggagattctggacatcacaccatgttcctttggaggagtgtctgtgattacacctggcaccaacaccagcaaccaggtggctgtgctctaccaggatgtgaactgtactgaggtgcctgtggctatccatgctgaccaacttacaccaacctggagggtctacagcacaggcagcaatgtgttccagaccagggctggctgtctgattggagcagagcatgtgaacaactcctatgagtgtgacatcccaattggagcaggcatctgtgcctcctaccagacccagaccggtggcggtgggtcgaggtctgtggcaagccagagcatcattgcctacacaatgagtctgggagcagagaactctgtggcttacagcaacaacagcattgccatcccaaccaacttcaccatctctgtgaccacagagattctgcctgtgagtatgaccaagacctctgtggactgtacaatgtatatctgtggagacagcacagagtgtagcaacctgctgctccaatatggctccttctgtacccaacttaacagggctctgacaggcattgctgtggaacaggacaagaacacccaggaggtgtttgcccaggtgaagcagatttacaagacacctccaatcaaggactttggaggcttcaacttcagccagattctgcctgacccaagcaagccaagcaagaggtccttcattgaggacctgctgttcaacaaggtgaccctggctgatgctggcttcatcaagcaatatggagactgtctgggagacattgctgccagggacctgatttgtgcccagaagttcaatggactgacagtgctgcctccactgctgacagatgagatgattgcccaatacacctctgccctgctggctggcaccatcacctctggctggacctttggagcaggagcagccctccaaatcccatttgctatgcagatggcttacaggttcaatggcattggagtgacccagaatgtgctctatgagaaccagaaactgattgccaaccagttcaactctgccattggcaagattcaggactccctgtccagcacagcctctgccctgggcaaactccaagatgtggtgaaccagaatgcccaggctctgaacaccctggtgaagcaactttccagcaactttggagccatctcctctgtgctgaatgacatcctgagcagactggacaaggtggaggctgaggtccagattgacagactgattacaggcagactccaatccctccaaacctatgtgacccaacaacttatcagggctgctgagattagggcatctgccaacctggctgccaccaagatgagtgagtgtgtgctgggacaaagcaagagggtggacttctgtggcaagggctaccacctgatgagttttccacagtctgcccctcatggagtggtgttcctgcatgtgacctatgtgcctgcccaggagaagaacttcaccacagcccctgccatctgccatgatggcaaggctcactttccaagggagggagtgtttgtgagcaatggcacccactggtttgtgacccagaggaacttctatgaaccacagattatcaccacagacaacacctttgtgtctggcaactgtgatgtggtgattggcattgtgaacaacacagtctatgacccactccaacctgaactggactccttcaaggaggaactggacaaatacttcaagaaccacaccagccctgatgtggacctgggagacatctctggcatcaatgcctctgtggtgaacatccagaaggagattgacagactgaatgaggtggctaagaacctgaatgagtccctgattgacctccaagaactgggcaaatatgaacaatacatcaagtggccatgaaaattgatcataatcagccataccacatttgtagaggttttacttgctttaaaaaacctcccacacctccccctgaacctgaaacataaaatgaatgcaattgttgttgttaacttgtttattgcagcttataatggttacaaataaagcaatagcatcacaaatttcacaaataaagcatttttttcactgcattctagttgtggtttgtccaaactcatcaatgtatcttaacgcggatcaaattgggcgtggcttaagggtgggaaagaatatataaggtgggggtcttatgtagttttgtatctgttttgcagcagccgccgccgccatgagcaccaactcgtttgatggaagcattgtgagctcatatttgacaacgcgcatgcccccatgggccggggtgcgtcagaatgtgatgggctccagcattgatggtcgccccgtcctgcccgcaaactctactaccttgacctacgagaccgtgtctggaacgccgttggagactgcagcctccgccgccgcttcagccgctgcagccaccgcccgcgggattgtgactgactttgctttcctgagcccgcttgcaagcagtgcagcttcccgttcatccgcccgcgatgacaagttgacggctcttttggcacaattggattctttgacccgggaacttaatgtcgtttctcagcagctgttggatctgcgccagcaggtttctgccctgaaggcttcctcccctcccaatgcggtttaaaacataaataaaaaaccagactctgtttggatttggatcaagcaagtgtcttgctgtctttatttaggggttttgcgcgcgcggtaggcccgggaccagcggtctcggtcgttgagggtcctgtgtattttttccaggacgtggtaaaggtgactctggatgttcagatacatgggcataagcccgtctctggggtggaggtagcaccactgcagagcttcatgctgcggggtggtgttgtagatgatccagtcgtagcaggagcgctgggcgtggtgcctaaaaatgtctttcagtagcaagctgattgccaggggcaggcccttggtgtaagtgtttacaaagcggttaagctgggatgggtgcatacgtggggatatgagatgcatcttggactgtatttttaggttggctatgttcccagccatatccctccggggattcatgttgtgcagaaccaccagcacagtgtatccggtgcacttgggaaatttgtcatgtagcttagaaggaaatgcgtggaagaacttggagacgcccttgtgacctccaagattttccatgcattcgtccataatgatggcaatgggcccacgggcggcggcctgggcgaagatatttctgggatcactaacgtcatagttgtgttccaggatgagatcgtcataggccatttttacaaagcgcgggcggagggtgccagactgcggtataatggttccatccggcccaggggcgtagttaccctcacagatttgcatttcccacgctttgagttcagatggggggatcatgtctacctgcggggcgatgaagaaaacggtttccggggtaggggagatcagctgggaagaaagcaggttcctgagcagctgcgacttaccgcagccggtgggcccgtaaatcacacctattaccgggtgcaactggtagttaagagagctgcagctgccgtcatccctgagcaggggggccacttcgttaagcatgtccctgactcgcatgttttccctgaccaaatccgccagaaggcgctcgccgcccagcgatagcagttcttgcaaggaagcaaagtttttcaacggtttgagaccgtccgccgtaggcatgcttttgagcgtttgaccaagcagttccaggcggtcccacagctcggtcacctgctctacggcatctcgatccagcatatctcctcgtttcgcgggttggggcggctttcgctgtacggcagtagtcggtgctcgtccagacgggccagggtcatgtctttccacgggcgcagggtcctcgtcagcgtagtctgggtcacggtgaaggggtgcgctccgggctgcgcgctggccagggtgcgcttgaggctggtcctgctggtgctgaagcgctgccggtcttcgccctgcgcgtcggccaggtagcatttgaccatggtgtcatagtccagcccctccgcggcgtggcccttggcgcgcagcttgcccttggaggaggcgccgcacgaggggcagtgcagacttttgagggcgtagagcttgggcgcgagaaataccgattccggggagtaggcatccgcgccgcaggccccgcagacggtctcgcattccacgagccaggtgagctctggccgttcggggtcaaaaaccaggtttcccccatgctttttgatgcgtttcttacctctggtttccatgagccggtgtccacgctcggtgacgaaaaggctgtccgtgtccccgtatacagacttgagaggcctgtcctcgagcggtgttccgcggtcctcctcgtatagaaactcggaccactctgagacaaaggctcgcgtccaggccagcacgaaggaggctaagtgggaggggtagcggtcgttgtccactagggggtccactcgctccagggtgtgaagacacatgtcgccctcttcggcatcaaggaaggtgattggtttgtaggtgtaggccacgtgaccgggtgttcctgaaggggggctataaaagggggtgggggcgcgttcgtcctcactctcttccgcatcgctgtctgcgagggccagctgttggggtgagtactccctctgaaaagcgggcatgacttctgcgctaagattgtcagtttccaaaaacgaggaggatttgatattcacctggcccgcggtgatgcctttgagggtggccgcatccatctggtcagaaaagacaatctttttgttgtcaagcttggtggcaaacgacccgtagagggcgttggacagcaacttggcgatggagcgcagggtttggtttttgtcgcgatcggcgcgctccttggccgcgatgtttagctgcacgtattcgcgcgcaacgcaccgccattcgggaaagacggtggtgcgctcgtcgggcaccaggtgcacgcgccaaccgcggttgtgcagggtgacaaggtcaacgctggtggctacctctccgcgtaggcgctcgttggtccagcagaggcggccgcccttgcgcgagcagaatggcggtagggggtctagctgcgtctcgtccggggggtctgcgtccacggtaaagaccccgggcagcaggcgcgcgtcgaagtagtctatcttgcatccttgcaagtctagcgcctgctgccatgcgcgggcggcaagcgcgcgctcgtatgggttgagtgggggaccccatggcatggggtgggtgagcgcggaggcgtacatgccgcaaatgtcgtaaacgtagaggggctctctgagtattccaagatatgtagggtagcatcttccaccgcggatgctggcgcgcacgtaatcgtatagttcgtgcgagggagcgaggaggtcgggaccgaggttgctacgggcgggctgctctgctcggaagactatctgcctgaagatggcatgtgagttggatgatatggttggacgctggaagacgttgaagctggcgtctgtgagacctaccgcgtcacgcacgaaggaggcgtaggagtcgcgcagcttgttgaccagctcggcggtgacctgcacgtctagggcgcagtagtccagggtttccttgatgatgtcatacttatcctgtcccttttttttccacagctcgcggttgaggacaaactcttcgcggtctttccagtactcttggatcggaaacccgtcggcctccgaacggtaagagcctagcatgtagaactggttgacggcctggtaggcgcagcatcccttttctacgggtagcgcgtatgcctgcgcggccttccggagcgaggtgtgggtgagcgcaaaggtgtccctgaccatgactttgaggtactggtatttgaagtcagtgtcgtcgcatccgccctgctcccagagcaaaaagtccgtgcgctttttggaacgcggatttggcagggcgaaggtgacatcgttgaagagtatctttcccgcgcgaggcataaagttgcgtgtgatgcggaagggtcccggcacctcggaacggttgttaattacctgggcggcgagcacgatctcgtcaaagccgttgatgttgtggcccacaatgtaaagttccaagaagcgcgggatgcccttgatggaaggcaattttttaagttcctcgtaggtgagctcttcaggggagctgagcccgtgctctgaaagggcccagtctgcaagatgagggttggaagcgacgaatgagctccacaggtcacgggccattagcatttgcaggtggtcgcgaaaggtcctaaactggcgacctatggccattttttctggggtgatgcagtagaaggtaagcgggtcttgttcccagcggtcccatccaaggttcgcggctaggtctcgcgcggcagtcactagaggctcatctccgccgaacttcatgaccagcatgaagggcacgagctgcttcccaaaggcccccatccaagtataggtctctacatcgtaggtgacaaagagacgctcggtgcgaggatgcgagccgatcgggaagaactggatctcccgccaccaattggaggagtggctattgatgtggtgaaagtagaagtccctgcgacgggccgaacactcgtgctggcttttgtaaaaacgtgcgcagtactggcagcggtgcacgggctgtacatcctgcacgaggttgacctgacgaccgcgcacaaggaagcagagtgggaatttgagcccctcgcctggcgggtttggctggtggtcttctacttcggctgcttgtccttgaccgtctggctgctcgaggggagttacggtggatcggaccaccacgccgcgcgagcccaaagtccagatgtccgcgcgcggcggtcggagcttgatgacaacatcgcgcagatgggagctgtccatggtctggagctcccgcggcgtcaggtcaggcgggagctcctgcaggtttacctcgcatagacgggtcagggcgcgggctagatccaggtgatacctaatttccaggggctggttggtggcggcgtcgatggcttgcaagaggccgcatccccgcggcgcgactacggtaccgcgcggcgggcggtgggccgcgggggtgtccttggatgatgcatctaaaagcggtgacgcgggcgagcccccggaggtagggggggctccggacccgccgggagagggggcaggggcacgtcggcgccgcgcgcgggcaggagctggtgctgcgcgcgtaggttgctggcgaacgcgacgacgcggcggttgatctcctgaatctggcgcctctgcgtgaagacgacgggcccggtgagcttgaacctgaaagagagttcgacagaatcaatttcggtgtcgttgacggcggcctggcgcaaaatctcctgcacgtctcctgagttgtcttgataggcgatctcggccatgaactgctcgatctcttcctcctggagatctccgcgtccggctcgctccacggtggcggcgaggtcgttggaaatgcgggccatgagctgcgagaaggcgttgaggcctccctcgttccagacgcggctgtagaccacgcccccttcggcatcgcgggcgcgcatgaccacctgcgcgagattgagctccacgtgccgggcgaagacggcgtagtttcgcaggcgctgaaagaggtagttgagggtggtggcggtgtgttctgccacgaagaagtacataacccagcgtcgcaacgtggattcgttgatatcccccaaggcctcaaggcgctccatggcctcgtagaagtccacggcgaagttgaaaaactgggagttgcgcgccgacacggttaactcctcctccagaagacggatgagctcggcgacagtgtcgcgcacctcgcgctcaaaggctacaggggcctcttcttcttcttcaatctcctcttccataagggcctccccttcttcttcttctggcggcggtgggggaggggggacacggcggcgacgacggcgcaccgggaggcggtcgacaaagcgctcgatcatctccccgcggcgacggcgcatggtctcggtgacggcgcggccgttctcgcgggggcgcagttggaagacgccgcccgtcatgtcccggttatgggttggcggggggctgccatgcggcagggatacggcgctaacgatgcatctcaacaattgttgtgtaggtactccgccgccgagggacctgagcgagtccgcatcgaccggatcggaaaacctctcgagaaaggcgtctaaccagtcacagtcgcaaggtaggctgagcaccgtggcgggcggcagcgggcggcggtcggggttgtttctggcggaggtgctgctgatgatgtaattaaagtaggcggtcttgagacggcggatggtcgacagaagcaccatgtccttgggtccggcctgctgaatgcgcaggcggtcggccatgccccaggcttcgttttgacatcggcgcaggtctttgtagtagtcttgcatgagcctttctaccggcacttcttcttctccttcctcttgtcctgcatctcttgcatctatcgctgcggcggcggcggagtttggccgtaggtggcgccctcttcctcccatgcgtgtgaccccgaagcccctcatcggctgaagcagggctaggtcggcgacaacgcgctcggctaatatggcctgctgcacctgcgtgagggtagactggaagtcatccatgtccacaaagcggtggtatgcgcccgtgttgatggtgtaagtgcagttggccataacggaccagttaacggtctggtgacccggctgcgagagctcggtgtacctgagacgcgagtaagccctcgagtcaaatacgtagtcgttgcaagtccgcaccaggtactggtatcccaccaaaaagtgcggcggcggctggcggtagaggggccagcgtagggtggccggggctccgggggcgagatcttccaacataaggcgatgatatccgtagatgtacctggacatccaggtgatgccggcggcggtggtggaggcgcgcggaaagtcgcggacgcggttccagatgttgcgcagcggcaaaaagtgctccatggtcgggacgctctggccggtcaggcgcgcgcaatcgttgacgctctagcgtgcaaaaggagagcctgtaagcgggcactcttccgtggtctggtggataaattcgcaagggtatcatggcggacgaccggggttcgagccccgtatccggccgtccgccgtgatccatgcggttaccgcccgcgtgtcgaacccaggtgtgcgacgtcagacaacgggggagtgctccttttggcttccttccaggcgcggcggctgctgcgctagcttttttggccactggccgcgcgcagcgtaagcggttaggctggaaagcgaaagcattaagtggctcgctccctgtagccggagggttattttccaagggttgagtcgcgggacccccggttcgagtctcggaccggccggactgcggcgaacgggggtttgcctccccgtcatgcaagaccccgcttgcaaattcctccggaaacagggacgagccccttttttgcttttcccagatgcatccggtgctgcggcagatgcgcccccctcctcagcagcggcaagagcaagagcagcggcagacatgcagggcaccctcccctcctcctaccgcgtcaggaggggcgacatccgcggttgacgcggcagcagatggtgattacgaacccccgcggcgccgggcccggcactacctggacttggaggagggcgagggcctggcgcggctaggagcgccctctcctgagcggcacccaagggtgcagctgaagcgtgatacgcgtgaggcgtacgtgccgcggcagaacctgtttcgcgaccgcgagggagaggagcccgaggagatgcgggatcgaaagttccacgcagggcgcgagctgcggcatggcctgaatcgcgagcggttgctgcgcgaggaggactttgagcccgacgcgcgaaccgggattagtcccgcgcgcgcacacgtggcggccgccgacctggtaaccgcatacgagcagacggtgaaccaggagattaactttcaaaaaagctttaacaaccacgtgcgtacgcttgtggcgcgcgaggaggtggctataggactgatgcatctgtgggactttgtaagcgcgctggagcaaaacccaaatagcaagccgctcatggcgcagctgttccttatagtgcagcacagcagggacaacgaggcattcagggatgcgctgctaaacatagtagagcccgagggccgctggctgctcgatttgataaacatcctgcagagcatagtggtgcaggagcgcagcttgagcctggctgacaaggtggccgccatcaactattccatgcttagcctgggcaagttttacgcccgcaagatataccataccccttacgttcccatagacaaggaggtaaagatcgaggggttctacatgcgcatggcgctgaaggtgcttaccttgagcgacgacctgggcgtttatcgcaacgagcgcatccacaaggccgtgagcgtgagccggcggcgcgagctcagcgaccgcgagctgatgcacagcctgcaaagggccctggctggcacgggcagcggcgatagagaggccgagtcctactttgacgcgggcgctgacctgcgctgggccccaagccgacgcgccctggaggcagctggggccggacctgggctggcggtggcacccgcgcgcgctggcaacgtcggcggcgtggaggaatatgacgaggacgatgagtacgagccagaggacggcgagtactaagcggtgatgtttctgatcagatgatgcaagacgcaacggacccggcggtgcgggcggcgctgcagagccagccgtccggccttaactccacggacgactggcgccaggtcatggaccgcatcatgtcgctgactgcgcgcaatcctgacgcgttccggcagcagccgcaggccaaccggctctccgcaattctggaagcggtggtcccggcgcgcgcaaaccccacgcacgagaaggtgctggcgatcgtaaacgcgctggccgaaaacagggccatccggcccgacgaggccggcctggtctacgacgcgctgcttcagcgcgtggctcgttacaacagcggcaacgtgcagaccaacctggaccggctggtgggggatgtgcgcgaggccgtggcgcagcgtgagcgcgcgcagcagcagggcaacctgggctccatggttgcactaaacgccttcctgagtacacagcccgccaacgtgccgcggggacaggaggactacaccaactttgtgagcgcactgcggctaatggtgactgagacaccgcaaagtgaggtgtaccagtctgggccagactattttttccagaccagtagacaaggcctgcagaccgtaaacctgagccaggctttcaaaaacttgcaggggctgtggggggtgcgggctcccacaggcgaccgcgcgaccgtgtctagcttgctgacgcccaactcgcgcctgttgctgctgctaatagcgcccttcacggacagtggcagcgtgtcccgggacacatacctaggtcacttgctgacactgtaccgcgaggccataggtcaggcgcatgtggacgagcatactttccaggagattacaagtgtcagccgcgcgctggggcaggaggacacgggcagcctggaggcaaccctaaactacctgctgaccaaccggcggcagaagatcccctcgttgcacagtttaaacagcgaggaggagcgcattttgcgctacgtgcagcagagcgtgagccttaacctgatgcgcgacggggtaacgcccagcgtggcgctggacatgaccgcgcgcaacatggaaccgggcatgtatgcctcaaaccggccgtttatcaaccgcctaatggactacttgcatcgcgcggccgccgtgaaccccgagtatttcaccaatgccatcttgaacccgcactggctaccgccccctggtttctacaccgggggattcgaggtgcccgagggtaacgatggattcctctgggacgacatagacgacagcgtgttttccccgcaaccgcagaccctgctagagttgcaacagcgcgagcaggcagaggcggcgctgcgaaaggaaagcttccgcaggccaagcagcttgtccgatctaggcgctgcggccccgcggtcagatgctagtagcccatttccaagcttgatagggtctcttaccagcactcgcaccacccgcccgcgcctgctgggcgaggaggagtacctaaacaactcgctgctgcagccgcagcgcgaaaaaaacctgcctccggcatttcccaacaacgggatagagagcctagtggacaagatgagtagatggaagacgtacgcgcaggagcacagggacgtgccaggcccgcgcccgcccacccgtcgtcaaaggcacgaccgtcagcggggtctggtgtgggaggacgatgactcggcagacgacagcagcgtcctggatttgggagggagtggcaacccgtttgcgcaccttcgccccaggctggggagaatgttttaaaaaaaaaaaagcatgatgcaaaataaaaaactcaccaaggccatggcaccgagcgttggttttcttgtattccccttagtatgcggcgcgcggcgatgtatgaggaaggtcctcctccctcctacgagagtgtggtgagcgcggcgccagtggcggcggcgctgggttctcccttcgatgctcccctggacccgccgtttgtgcctccgcggtacctgcggcctaccggggggagaaacagcatccgttactctgagttggcacccctattcgacaccacccgtgtgtacctggtggacaacaagtcaacggatgtggcatccctgaactaccagaacgaccacagcaactttctgaccacggtcattcaaaacaatgactacagcccgggggaggcaagcacacagaccatcaatcttgacgaccggtcgcactggggcggcgacctgaaaaccatcctgcataccaacatgccaaatgtgaacgagttcatgtttaccaataagtttaaggcgcgggtgatggtgtcgcgcttgcctactaaggacaatcaggtggagctgaaatacgagtgggtggagttcacgctgcccgagggcaactactccgagaccatgaccatagaccttatgaacaacgcgatcgtggagcactacttgaaagtgggcagacagaacggggttctggaaagcgacatcggggtaaagtttgacacccgcaacttcagactggggtttgaccccgtcactggtcttgtcatgcctggggtatatacaaacgaagccttccatccagacatcattttgctgccaggatgcggggtggacttcacccacagccgcctgagcaacttgttgggcatccgcaagcggcaacccttccaggagggctttaggatcacctacgatgatctggagggtggtaacattcccgcactgttggatgtggacgcctaccaggcgagcttgaaagatgacaccgaacagggcgggggtggcgcaggcggcagcaacagcagtggcagcggcgcggaagagaactccaacgcggcagccgcggcaatgcagccggtggaggacatgaacgatcatgccattcgcggcgacacctttgccacacgggctgaggagaagcgcgctgaggccgaagcagcggccgaagctgccgcccccgctgcgcaacccgaggtcgagaagcctcagaagaaaccggtgatcaaacccctgacagaggacagcaagaaacgcagttacaacctaataagcaatgacagcaccttcacccagtaccgcagctggtaccttgcatacaactacggcgaccctcagaccggaatccgctcatggaccctgctttgcactcctgacgtaacctgcggctcggagcaggtctactggtcgttgccagacatgatgcaagaccccgtgaccttccgctccacgcgccagatcagcaactttccggtggtgggcgccgagctgttgcccgtgcactccaagagcttctacaacgaccaggccgtctactcccaactcatccgccagtttacctctctgacccacgtgttcaatcgctttcccgagaaccagattttggcgcgcccgccagcccccaccatcaccaccgtcagtgaaaacgttcctgctctcacagatcacgggacgctaccgctgcgcaacagcatcggaggagtccagcgagtgaccattactgacgccagacgccgcacctgcccctacgtttacaaggccctgggcatagtctcgccgcgcgtcctatcgagccgcactttttgagcaagcatgtccatccttatatcgcccagcaataacacaggctggggcctgcgcttcccaagcaagatgtttggcggggccaagaagcgctccgaccaacacccagtgcgcgtgcgcgggcactaccgcgcgccctggggcgcgcacaaacgcggccgcactgggcgcaccaccgtcgatgacgccatcgacgcggtggtggaggaggcgcgcaactacacgcccacgccgccaccagtgtccacagtggacgcggccattcagaccgtggtgcgcggagcccggcgctatgctaaaatgaagagacggcggaggcgcgtagcacgtcgccaccgccgccgacccggcactgccgcccaacgcgcggcggcggccctgcttaaccgcgcacgtcgcaccggccgacgggcggccatgcgggccgctcgaaggctggccgcgggtattgtcactgtgccccccaggtccaggcgacgagcggccgccgcagcagccgcggccattagtgctatgactcagggtcgcaggggcaacgtgtattgggtgcgcgactcggttagcggcctgcgcgtgcccgtgcgcacccgccccccgcgcaactagattgcaagaaaaaactacttagactcgtactgttgtatgtatccagcggcggcggcgcgcaacgaagctatgtccaagcgcaaaatcaaagaagagatgctccaggtcatcgcgccggagatctatggccccccgaagaaggaagagcaggattacaagccccgaaagctaaagcgggtcaaaaagaaaaagaaagatgatgatgatgaacttgacgacgaggtggaactgctgcacgctaccgcgcccaggcgacgggtacagtggaaaggtcgacgcgtaaaacgtgttttgcgacccggcaccaccgtagtctttacgcccggtgagcgctccacccgcacctacaagcgcgtgtatgatgaggtgtacggcgacgaggacctgcttgagcaggccaacgagcgcctcggggagtttgcctacggaaagcggcataaggacatgctggcgttgccgctggacgagggcaacccaacacctagcctaaagcccgtaacactgcagcaggtgctgcccgcgcttgcaccgtccgaagaaaagcgcggcctaaagcgcgagtctggtgacttggcacccaccgtgcagctgatggtacccaagcgccagcgactggaagatgtcttggaaaaaatgaccgtggaacctgggctggagcccgaggtccgcgtgcggccaatcaagcaggtggcgccgggactgggcgtgcagaccgtggacgttcagatacccactaccagtagcaccagtattgccaccgccacagagggcatggagacacaaacgtccccggttgcctcagcggtggcggatgccgcggtgcaggcggtcgctgcggccgcgtccaagacctctacggaggtgcaaacggacccgtggatgtttcgcgtttcagccccccggcgcccgcgccgttcgaggaagtacggcgccgccagcgcgctactgcccgaatatgccctacatccttccattgcgcctacccccggctatcgtggctacacctaccgccccagaagacgagcaactacccgacgccgaaccaccactggaacccgccgccgccgtcgccgtcgccagcccgtgctggccccgatttccgtgcgcagggtggctcgcgaaggaggcaggaccctggtgctgccaacagcgcgctaccaccccagcatcgtttaaaagccggtctttgtggttcttgcagatatggccctcacctgccgcctccgtttcccggtgccgggattccgaggaagaatgcaccgtaggaggggcatggccggccacggcctgacgggcggcatgcgtcgtgcgcaccaccggcggcggcgcgcgtcgcaccgtcgcatgcgcggcggtatcctgcccctccttattccactgatcgccgcggcgattggcgccgtgcccggaattgcatccgtggccttgcaggcgcagagacactgattaaaaacaagttgcatgtggaaaaatcaaaataaaaagtctggactctcacgctcgcttggtcctgtaactattttgtagaatggaagacatcaactttgcgtctctggccccgcgacacggctcgcgcccgttcatgggaaactggcaagatatcggcaccagcaatatgagcggtggcgccttcagctggggctcgctgtggagcggcattaaaaatttcggttccaccgttaagaactatggcagcaaggcctggaacagcagcacaggccagatgctgagggataagttgaaagagcaaaatttccaacaaaaggtggtagatggcctggcctctggcattagcggggtggtggacctggccaaccaggcagtgcaaaataagattaacagtaagcttgatccccgccctcccgtagaggagcctccaccggccgtggagacagtgtctccagaggggcgtggcgaaaagcgtccgcgccccgacagggaagaaactctggtgacgcaaatagacgagcctccctcgtacgaggaggcactaaagcaaggcctgcccaccacccgtcccatcgcgcccatggctaccggagtgctgggccagcacacacccgtaacgctggacctgcctccccccgccgacacccagcagaaacctgtgctgccaggcccgaccgccgttgttgtaacccgtcctagccgcgcgtccctgcgccgcgccgccagcggtccgcgatcgttgcggcccgtagccagtggcaactggcaaagcacactgaacagcatcgtgggtctgggggtgcaatccctgaagcgccgacgatgcttctgatagctaacgtgtcgtatgtgtgtcatgtatgcgtccatgtcgccgccagaggagctgctgagccgccgcgcgcccgctttccaagatggctaccccttcgatgatgccgcagtggtcttacatgcacatctcgggccaggacgcctcggagtacctgagccccgggctggtgcagtttgcccgcgccaccgagacgtacttcagcctgaataacaagtttagaaaccccacggtggcgcctacgcacgacgtgaccacagaccggtcccagcgtttgacgctgcggttcatccctgtggaccgtgaggatactgcgtactcgtacaaggcgcggttcaccctagctgtgggtgataaccgtgtgctggacatggcttccacgtactttgacatccgcggcgtgctggacaggggccctacttttaagccctactctggcactgcctacaacgccctggctcccaagggtgccccaaatccttgcgaatgggatgaagctgctactgctcttgaaataaacctagaagaagaggacgatgacaacgaagacgaagtagacgagcaagctgagcagcaaaaaactcacgtatttgggcaggcgccttattctggtataaatattacaaaggagggtattcaaataggtgtcgaaggtcaaacacctaaatatgccgataaaacatttcaacctgaacctcaaataggagaatctcagtggtacgaaacagaaattaatcatgcagctgggagagtcctaaaaaagactaccccaatgaaaccatgttacggttcatatgcaaaacccacaaatgaaaatggagggcaaggcattcttgtaaagcaacaaaatggaaagctagaaagtcaagtggaaatgcaatttttctcaactactgaggcagccgcaggcaatggtgataacttgactcctaaagtggtattgtacagtgaagatgtagatatagaaaccccagacactcatatttcttacatgcccactattaaggaaggtaactcacgagaactaatgggccaacaatctatgcccaacaggcctaattacattgcttttagggacaattttattggtctaatgtattacaacagcacgggtaatatgggtgttctggcgggccaagcatcgcagttgaatgctgttgtagatttgcaagacagaaacacagagctttcataccagcttttgcttgattccattggtgatagaaccaggtacttttctatgtggaatcaggctgttgacagctatgatccagatgttagaattattgaaaatcatggaactgaagatgaacttccaaattactgctttccactgggaggtgtgattaatacagagactcttaccaaggtaaaacctaaaacaggtcaggaaaatggatgggaaaaagatgctacagaattttcagataaaaatgaaataagagttggaaataattttgccatggaaatcaatctaaatgccaacctgtggagaaatttcctgtactccaacatagcgctgtatttgcccgacaagctaaagtacagtccttccaacgtaaaaatttctgataacccaaacacctacgactacatgaacaagcgagtggtggctcccgggctagtggactgctacattaaccttggagcacgctggtcccttgactatatggacaacgtcaacccatttaaccaccaccgcaatgctggcctgcgctaccgctcaatgttgctgggcaatggtcgctatgtgcccttccacatccaggtgcctcagaagttctttgccattaaaaacctccttctcctgccgggctcatacacctacgagtggaacttcaggaaggatgttaacatggttctgcagagctccctaggaaatgacctaagggttgacggagccagcattaagtttgatagcatttgcctttacgccaccttcttccccatggcccacaacaccgcctccacgcttgaggccatgcttagaaacgacaccaacgaccagtcctttaacgactatctctccgccgccaacatgctctaccctatacccgccaacgctaccaacgtgcccatatccatcccctcccgcaactgggcggctttccgcggctgggccttcacgcgccttaagactaaggaaaccccatcactgggctcgggctacgacccttattacacctactctggctctataccctacctagatggaaccttttacctcaaccacacctttaagaaggtggccattacctttgactcttctgtcagctggcctggcaatgaccgcctgcttacccccaacgagtttgaaattaagcgctcagttgacggggagggttacaacgttgcccagtgtaacatgaccaaagactggttcctggtacaaatgctagctaactataacattggctaccagggcttctatatcccagagagctacaaggaccgcatgtactccttctttagaaacttccagcccatgagccgtcaggtggtggatgatactaaatacaaggactaccaacaggtgggcatcctacaccaacacaacaactctggatttgttggctaccttgcccccaccatgcgcgaaggacaggcctaccctgctaacttcccctatccgcttataggcaagaccgcagttgacagcattacccagaaaaagtttctttgcgatcgcaccctttggcgcatcccattctccagtaactttatgtccatgggcgcactcacagacctgggccaaaaccttctctacgccaactccgcccacgcgctagacatgacttttgaggtggatcccatggacgagcccacccttctttatgttttgtttgaagtctttgacgtggtccgtgtgcaccagccgcaccgcggcgtcatcgaaaccgtgtacctgcgcacgcccttctcggccggcaacgccacaacataaagaagcaagcaacatcaacaacagctgccgccatgggctccagtgagcaggaactgaaagccattgtcaaagatcttggttgtgggccatattttttgggcacctatgacaagcgctttccaggctttgtttctccacacaagctcgcctgcgccatagtcaatacggccggtcgcgagactgggggcgtacactggatggcctttgcctggaacccgcactcaaaaacatgctacctctttgagccctttggcttttctgaccagcgactcaagcaggtttaccagtttgagtacgagtcactcctgcgccgtagcgccattgcttcttcccccgaccgctgtataacgctggaaaagtccacccaaagcgtacaggggcccaactcggccgcctgtggactattctgctgcatgtttctccacgcctttgccaactggccccaaactcccatggatcacaaccccaccatgaaccttattaccggggtacccaactccatgctcaacagtccccaggtacagcccaccctgcgtcgcaaccaggaacagctctacagcttcctggagcgccactcgccctacttccgcagccacagtgcgcagattaggagcgccacttctttttgtcacttgaaaaacatgtaaaaataatgtactagagacactttcaataaaggcaaatgcttttatttgtacactctcgggtgattatttacccccacccttgccgtctgcgccgtttaaaaatcaaaggggttctgccgcgcatcgctatgcgccactggcagggacacgttgcgatactggtgtttagtgctccacttaaactcaggcacaaccatccgcggcagctcggtgaagttttcactccacaggctgcgcaccatcaccaacgcgtttagcaggtcgggcgccgatatcttgaagtcgcagttggggcctccgccctgcgcgcgcgagttgcgatacacagggttgcagcactggaacactatcagcgccgggtggtgcacgctggccagcacgctcttgtcggagatcagatccgcgtccaggtcctccgcgttgctcagggcgaacggagtcaactttggtagctgccttcccaaaaagggcgcgtgcccaggctttgagttgcactcgcaccgtagtggcatcaaaaggtgaccgtgcccggtctgggcgttaggatacagcgcctgcataaaagccttgatctgcttaaaagccacctgagcctttgcgccttcagagaagaacatgccgcaagacttgccggaaaactgattggccggacaggccgcgtcgtgcacgcagcaccttgcgtcggtgttggagatctgcaccacatttcggccccaccggttcttcacgatcttggccttgctagactgctccttcagcgcgcgctgcccgttttcgctcgtcacatccatttcaatcacgtgctccttatttatcataatgcttccgtgtagacacttaagctcgccttcgatctcagcgcagcggtgcagccacaacgcgcagcccgtgggctcgtgatgcttgtaggtcacctctgcaaacgactgcaggtacgcctgcaggaatcgccccatcatcgtcacaaaggtcttgttgctggtgaaggtcagctgcaacccgcggtgctcctcgttcagccaggtcttgcatacggccgccagagcttccacttggtcaggcagtagtttgaagttcgcctttagatcgttatccacgtggtacttgtccatcagcgcgcgcgcagcctccatgcccttctcccacgcagacacgatcggcacactcagcgggttcatcaccgtaatttcactttccgcttcgctgggctcttcctcttcctcttgcgtccgcataccacgcgccactgggtcgtcttcattcagccgccgcactgtgcgcttacctcctttgccatgcttgattagcaccggtgggttgctgaaacccaccatttgtagcgccacatcttctctttcttcctcgctgtccacgattacctctggtgatggcgggcgctcgggcttgggagaagggcgcttctttttcttcttgggcgcaatggccaaatccgccgccgaggtcgatggccgcgggctgggtgtgcgcggcaccagcgcgtcttgtgatgagtcttcctcgtcctcggactcgatacgccgcctcatccgcttttttgggggcgcccggggaggcggcggcgacggggacggggacgacacgtcctccatggttgggggacgtcgcgccgcaccgcgtccgcgctcgggggtggtttcgcgctgctcctcttcccgactggccatttccttctcctataggcagaaaaagatcatggagtcagtcgagaagaaggacagcctaaccgccccctctgagttcgccaccaccgcctccaccgatgccgccaacgcgcctaccaccttccccgtcgaggcacccccgcttgaggaggaggaagtgattatcgagcaggacccaggttttgtaagcgaagacgacgaggaccgctcagtaccaacagaggataaaaagcaagaccaggacaacgcagaggcaaacgaggaacaagtcgggcggggggacgaaaggcatggcgactacctagatgtgggagacgacgtgctgttgaagcatctgcagcgccagtgcgccattatctgcgacgcgttgcaagagcgcagcgatgtgcccctcgccatagcggatgtcagccttgcctacgaacgccacctattctcaccgcgcgtaccccccaaacgccaagaaaacggcacatgcgagcccaacccgcgcctcaacttctaccccgtatttgccgtgccagaggtgcttgccacctatcacatctttttccaaaactgcaagatacccctatcctgccgtgccaaccgcagccgagcggacaagcagctggccttgcggcagggcgctgtcatacctgatatcgcctcgctcaacgaagtgccaaaaatctttgagggtcttggacgcgacgagaagcgcgcggcaaacgctctgcaacaggaaaacagcgaaaatgaaagtcactctggagtgttggtggaactcgagggtgacaacgcgcgcctagccgtactaaaacgcagcatcgaggtcacccactttgcctacccggcacttaacctaccccccaaggtcatgagcacagtcatgagtgagctgatcgtgcgccgtgcgcagcccctggagagggatgcaaatttgcaagaacaaacagaggagggcctacccgcagttggcgacgagcagctagcgcgctggcttcaaacgcgcgagcctgccgacttggaggagcgacgcaaactaatgatggccgcagtgctcgttaccgtggagcttgagtgcatgcagcggttctttgctgacccggagatgcagcgcaagctagaggaaacattgcactacacctttcgacagggctacgtacgccaggcctgcaagatctccaacgtggagctctgcaacctggtctcctaccttggaattttgcacgaaaaccgccttgggcaaaacgtgcttcattccacgctcaagggcgaggcgcgccgcgactacgtccgcgactgcgtttacttatttctatgctacacctggcagacggccatgggcgtttggcagcagtgcttggaggagtgcaacctcaaggagctgcagaaactgctaaagcaaaacttgaaggacctatggacggccttcaacgagcgctccgtggccgcgcacctggcggacatcattttccccgaacgcctgcttaaaaccctgcaacagggtctgccagacttcaccagtcaaagcatgttgcagaactttaggaactttatcctagagcgctcaggaatcttgcccgccacctgctgtgcacttcctagcgactttgtgcccattaagtaccgcgaatgccctccgccgctttggggccactgctaccttctgcagctagccaactaccttgcctaccactctgacataatggaagacgtgagcggtgacggtctactggagtgtcactgtcgctgcaacctatgcaccccgcaccgctccctggtttgcaattcgcagctgcttaacgaaagtcaaattatcggtacctttgagctgcagggtccctcgcctgacgaaaagtccgcggctccggggttgaaactcactccggggctgtggacgtcggcttaccttcgcaaatttgtacctgaggactaccacgcccacgagattaggttctacgaagaccaatcccgcccgcctaatgcggagcttaccgcctgcgtcattacccagggccacattcttggccaattgcaagccatcaacaaagcccgccaagagtttctgctacgaaagggacggggggtttacttggacccccagtccggcgaggagctcaacccaatccccccgccgccgcagccctatcagcagcagccgcgggcccttgcttcccaggatggcacccaaaaagaagctgcagctgccgccgccacccacggacgaggaggaatactgggacagtcaggcagaggaggttttggacgaggaggaggaggacatgatggaagactgggagagcctagacgaggaagcttccgaggtcgaagaggtgtcagacgaaacaccgtcaccctcggtcgcattcccctcgccggcgccccagaaatcggcaaccggttccagcatggctacaacctccgctcctcaggcgccgccggcactgcccgttcgccgacccaaccgtagatgggacaccactggaaccagggccggtaagtccaagcagccgccgccgttagcccaagagcaacaacagcgccaaggctaccgctcatggcgcgggcacaagaacgccatagttgcttgcttgcaagactgtgggggcaacatctccttcgcccgccgctttcttctctaccatcacggcgtggccttcccccgtaacatcctgcattactaccgtcatctctacagcccatactgcaccggcggcagcggcagcaacagcagcggccacacagaagcaaaggcgaccggatagcaagactctgacaaagcccaagaaatccacagcggcggcagcagcaggaggaggagcgctgcgtctggcgcccaacgaacccgtatcgacccgcgagcttagaaacaggatttttcccactctgtatgctatatttcaacagagcaggggccaagaacaagagctgaaaataaaaaacaggtctctgcgatccctcacccgcagctgcctgtatcacaaaagcgaagatcagcttcggcgcacgctggaagacgcggaggctctcttcagtaaatactgcgcgctgactcttaaggactagtttcgcgccctttctcaaatttaagcgcgaaaactacgtcatctccagcggccacacccggcgccagcacctgttgtcagcgccattatgagcaaggaaattcccacgccctacatgtggagttaccagccacaaatgggacttgcggctggagctgcccaagactactcaacccgaataaactacatgagcgcgggaccccacatgatatcccgggtcaacggaatacgcgcccaccgaaaccgaattctcctggaacaggcggctattaccaccacacctcgtaataaccttaatccccgtagttggcccgctgccctggtgtaccaggaaagtcccgctcccaccactgtggtacttcccagagacgcccaggccgaagttcagatgactaactcaggggcgcagcttgcgggcggctttcgtcacagggtgcggtcgcccgggcagggtataactcacctgacaatcagagggcgaggtattcagctcaacgacgagtcggtgagctcctcgcttggtctccgtccggacgggacatttcagatcggcggcgccggccgctcttcattcacgcctcgtcaggcaatcctaactctgcagacctcgtcctctgagccgcgctctggaggcattggaactctgcaatttattgaggagtttgtgccatcggtctactttaaccccttctcgggacctcccggccactatccggatcaatttattcctaactttgacgcggtaaaggactcggcggacggctacgactgaatgttaagtggagaggcagagcaactgcgcctgaaacacctggtccactgtcgccgccacaagtgctttgcccgcgactccggtgagttttgctactttgaattgcccgaggatcatatcgagggcccggcgcacggcgtccggcttaccgcccagggagagcttgcccgtagcctgattcgggagtttacccagcgccccctgctagttgagcgggacaggggaccctgtgttctcactgtgatttgcaactgtcctaaccctggattacatcaagatcctctagttaatgtcaggtcgcctaagtcgattaactagagtacccggggatcttattccctttaactaataaaaaaaaataataaagcatcacttacttaaaatcagttagcaaatttctgtccagtttattcagcagcacctccttgccctcctcccagctctggtattgcagcttcctcctggctgcaaactttctccacaatctaaatggaatgtcagtttcctcctgttcctgtccatccgcacccactatcttcatgttgttgcagatgaagcgcgcaagaccgtctgaagataccttcaaccccgtgtatccatatgacacggaaaccggtcctccaactgtgccttttcttactcctccctttgtatcccccaatgggtttcaagagagtccccctggggtactctctttgcgcctatccgaacctctagttacctccaatggcatgcttgcgctcaaaatgggcaacggcctctctctggacgaggccggcaaccttacctcccaaaatgtaaccactgtgagcccacctctcaaaaaaaccaagtcaaacataaacctggaaatatctgcacccctcacagttacctcagaagccctaactgtggctgccgccgcacctctaatggtcgcgggcaacacactcaccatgcaatcacaggccccgctaaccgtgcacgactccaaacttagcattgccacccaaggacccctcacagtgtcagaaggaaagctagccctgcaaacatcaggccccctcaccaccaccgatagcagtacccttactatcactgcctcaccccctctaactactgccactggtagcttgggcattgacttgaaagagcccatttatacacaaaatggaaaactaggactaaagtacggggctcctttgcatgtaacagacgacctaaacactttgaccgtagcaactggtccaggtgtgactattaataatacttccttgcaaactaaagttactggagccttgggttttgattcacaaggcaatatgcaacttaatgtagcaggaggactaaggattgattctcaaaacagacgccttatacttgatgttagttatccgtttgatgctcaaaaccaactaaatctaagactaggacagggccctctttttataaactcagcccacaacttggatattaactacaacaaaggcctttacttgtttacagcttcaaacaattccaaaaagcttgaggttaacctaagcactgccaaggggttgatgtttgacgctacagccatagccattaatgcaggagatgggcttgaatttggttcacctaatgcaccaaacacaaatcccctcaaaacaaaaattggccatggcctagaatttgattcaaacaaggctatggttcctaaactaggaactggccttagttttgacagcacaggtgccattacagtaggaaacaaaaataatgataagctaactttgtggaccggaataaaccctccacctaactgtcaaattgtggaaaacactaatacaaatgatggcaaacttactttagtattagtaaaaaatggagggcttgttaatggctacgtgtctctagttggtgtatcagacactgtgaaccaaatgttcacacaaaagacagcaaacatccaattaagattatattttgactcttctggaaatctattaactgaggaatcagacttaaaaattccacttaaaaataaatcttctacagcgaccagtgaaactgtagccagcagcaaagcctttatgccaagtactacagcttatcccttcaacaccactactagggatagtgaaaactacattcatggaatatgttactacatgactagttatgatagaagtctatttcccttgaacatttctataatgctaaacagccgtatgatttcttccaatgttgcctatgccatacaatttgaatggaatctaaatgcaagtgaatctccagaaagcaacatagctacgctgaccacatccccctttttcttttcttacattacagaagacgacaactaaagaatcgtttgtgttatgtttcaacgtgtttatttttcaattgcagaaaatttcaagtcatttttcattcagtagtatagccccaccaccacatagcttatacagatcaccgtaccttaatcaaacgtttttttttttattccaaaagattatccaaaacctcaaaatgaagatctattaagtgaacgcgctcccctccggtggcgtggtcaaactctacagccaaagaacagataatggcatttgtaagatgttgcacaatggcttccaaaaggcaaacggccctcacgtccaagtggacgtaaaggctaaacccttcagggtgaatctcctctataaacattccagcaccttcaaccatgcccaaataattctcatctcgccaccttctcaatatatctctaagcaaatcccgaatattaagtccggccattgtaaaaatctgctccagagcgccctccaccttcagcctcaagcagcgaatcatgattgcaaaaattcaggttcctcacagacctgtataagattcaaaagcggaacattaacaaaaataccgcgatcccgtaggtcccttcgcagggccagctgaacataatcgtgcaggtctgcacggaccagcgcggccacttccccgccaggaaccatgacaaaagaacccacactgattatgacacgcatactcggagctatgctaaccagcgtagccccgatgtaagcttgttgcatgggcggcgatataaaatgcaaggtgctgctcaaaaaatcaggcaaagcctcgcgcaaaaaagaaagcacatcgtagtcatgctcatgcagataaaggcaggtaagctccggaaccaccacagaaaaagacaccatttttctctcaaacatgtctgcgggtttctgcataaacacaaaataaaataacaaaaaaacatttaaacattagaagcctgtcttacaacaggaaaaacaacccttataagcataagacggactacggccatgccggcgtgaccgtaaaaaaactggtcaccgtgattaaaaagcaccaccgacagctcctcggtcatgtccggagtcataatgtaagactcggtaaacacatcaggttgattcacatcggtcagtgctaaaaagcgaccgaaatagcccgggggaatacatacccgcaggcgtagagacaacattacagcccccataggaggtataacaaaattaataggagagaaaaacacataaacacctgaaaaaccctcctgcctaggcaaaatagcaccctcccgctccagaacaacatacagcgcttccacagcggcagccataacagtcagccttaccagtaaaaaagaaaacctattaaaaaaacaccactcgacacggcaccagctcaatcagtcacagtgtaaaaaagggccaagtgcagagcgagtatatataggactaaaaaatgacgtaacggttaaagtccacaaaaaacacccagaaaaccgcacgcgaacctacgcccagaaacgaaagccaaaaaacccacaacttcctcaaatcgtcacttccgttttcccacgttacgtcacttcccattttaagaaaactacaattcccaacacatacaagttactccgccctaaaacctacgtcacccgccccgttcccacgccccgcgccacgtcacaaactccaccccctcattatcatattggcttcaatccaaaataaggtatattattgatgatg

SEQ ID NO: 13 - DNA, 35690 bp, Artificial Sequence
  Adk35R2-E4orf6/Spike-E4dlO4-7(E4re#8)
ttaattaacatcatcaataatataccttattttggattgaagccaatatgataatgagggggtggagtttgtgacgtggcgcggggcgtgggaacggggcgggtgacgtagtagtgtggcggaagtgtgatgttgcaagtgtggcggaacacatgtaagcgacggatgtggcaaaagtgacgtttttggtgtgcgccggtgtacacaggaagtgacaattttcgcgcggttttaggcggatgttgtagtaaatttgggcgtaaccgagtaagatttggccattttcgcgggaaaactgaataagaggaagtgaaatctgaataattttgtgttactcatagcgcgtaataatttgatccgcgttaagatacattgatgagtttggacaaaccacaactagaatgcagtgaaaaaaatgctttatttgtgaaatttgtgatgctattgctttatttgtaaccattataagctgcaataaacaagttaacaacaacaattgcattcattttatgtttcaggttcagggggaggtgtgggaggttttttaaagcaagtaaaacctctacaaatgtggtatggctgattatgatcaattttcatggccacttgatgtattgttcatatttgcccagttcttggaggtcaatcagggactcattcaggttcttagccacctcattcagtctgtcaatctccttctggatgttcaccacagaggcattgatgccagagatgtctcccaggtccacatcagggctggtgtggttcttgaagtatttgtccagttcctccttgaaggagtccagttcaggttggagtgggtcatagactgtgttgttcacaatgccaatcaccacatcacagttgccagacacaaaggtgttgtctgtggtgataatctgtggttcatagaagttcctctgggtcacaaaccagtgggtgccattgctcacaaacactccctcccttggaaagtgagccttgccatcatggcagatggcaggggctgtggtgaagttcttctcctgggcaggcacataggtcacatgcaggaacaccactccatgaggggcagactgtggaaaactcatcaggtggtagcccttgccacagaagtccaccctcttgctttgtcccagcacacactcactcatcttggtggcagccaggttggcagatgccctaatctcagcagccctgataagttgttgggtcacataggtttggagggattggagtctgcctgtaatcagtctgtcaatctggacctcagcctccaccttgtccagtctgctcaggatgtcattcagcacagaggagatggctccaaagttgctggaaagttgcttcaccagggtgttcagagcctgggcattctggttcaccacatcttggagtttgcccagggcagaggctgtgctggacagggagtcctgaatcttgccaatggcagagttgaactggttggcaatcagtttctggttctcatagagcacattctgggtcactccaatgccattgaacctgtaagccatctgcatagcaaatgggatttggagggctgctcctgctccaaaggtccagccagaggtgatggtgccagccagcagggcagaggtgtattgggcaatcatctcatctgtcagcagtggaggcagcactgtcagtccattgaacttctgggcacaaatcaggtccctggcagcaatgtctcccagacagtctccatattgcttgatgaagccagcatcagccagggtcaccttgttgaacagcaggtcctcaatgaaggacctcttgcttggcttgcttgggtcaggcagaatctggctgaagttgaagcctccaaagtccttgattggaggtgtcttgtaaatctgcttcacctgggcaaacacctcctgggtgttcttgtcctgttccacagcaatgcctgtcagagccctgttaagttgggtacagaaggagccatattggagcagcaggttgctacactctgtgctgtctccacagatatacattgtacagtccacagaggtcttggtcatactcacaggcagaatctctgtggtcacagagatggtgaagttggttgggatggcaatgctgttgttgctgtaagccacagagttctctgctcccagactcattgtgtaggcaatgatgctctggcttgccacagacctcgacccaccgccaccggtctgggtctggtaggaggcacagatgcctgctccaattgggatgtcacactcataggagttgttcacatgctctgctccaatcagacagccagccctggtctggaacacattgctgcctgtgctgtagaccctccaggttggtgtaagttggtcagcatggatagccacaggcacctcagtacagttcacatcctggtagagcacagccacctggttgctggtgttggtgccaggtgtaatcacagacactcctccaaaggaacatggtgtgatgtccagaatctccaaggtctgtgggtccctcacagcatctgtggtgtcagcaatgtccctgccaaactgttggaatggcaggaacttcttgttgctctctgtcagcactcctgtgcctgtcagtccattgaagttgaagttcacacacttgttcttcaccaggttggtgctcttctttggtccacacactgtggcaggggcatggagcagttcaaaggacagcaccaccaccctgtatggttggtagcccactccattggttggttggaagccataggattggagtggaaagtaacagttgaagccctccactccattacatggtgtgctgccagcctggtaaatctctgtgctgatgtccctctcaaatggtttcaggttgctcttcctgaacagtctgtagaggtagttgtagttgcctcccaccttgctgtccaggttgttgctgttccaggcaatcacacagcctgtgaagtcatcaggcagtttgtagttgtagtcagcaatcttgcctgtttgtccaggggcaatctgtctcacctcatctcccctaatcacaaaggagtcagcatagacattggtgaaacacaggtcattcagtttggttgggctcactccataacacttgaaggtgctgaaggaggcagagttgtagagcacagagtagtcagccacacagttgctaatcctcttcctgttccaggcatagacagaggcaaacctggtggcattgaacacctctccaaatggacacaggttggtgatgtttggaaacctcacaatgctctctgttggttggaccctgaagttgctggtctggtagatgcccttctccactgtgaaggatttcagggtacacttggtctcagacagtgggtccagggcacagtccacagcatctgtgatggtgccattctcattgtatttcagcaggaaggtccttggttggaggtagcccacatagtaggctgctgctcctgctgtccagccagaggaggagtctccaggtgtcaggtaggacctgtgcagagccagcagggtctggaacctggtgatgttgatgccaattggcaggtccaccagtggttccaaggcagagaagccctgtggcaggtccctcaccaggttgattggtgtgtgtttgctgtaaatcttgaagtagccatcaatgttcttgaacacaaactccctcaggttcttgaagttgccctgcttgccctccaagtccatcaggaatggttggctcacatattcaaaggtacagttgttggcagaggagtagaccctgaactcagactccatccaggacttgttgttcttgtggtagtagactcccaggaatgggtcattacagaactggaactcacacaccttaatcaccacattggtggcattgttcacaatcagcagggactgggtcttgctgtccagggtggtgccaaaaatccagcccctgatgatgttgctcttctctgtgctggcaaagtagactccatcattgaatggcagcacagggttgtcaaacctcttggtgccattggtgccagacacatggatggcatggaaccaggtcacattgctgaagaatggcaggaacaggtcctgggtgctgtgcagcacagaggacctgaacaccttgtcagggtagtagactcccctggtgaaggagttggtgtaggcaggaggaagttgggtcctggtggtcaggttcacacactggctggacaccagtggcagcagcaccaggaacacaaacatggtggcaaatcggaggctggatcggtcccggtgtcttctatggaggtcaaaacagcgtggatggcgtctccaggcgatctgacggttcactaaacgagctcgtcgacgatctctatcactgatagggagatctctatcactgatagggagagctctgcttatatagacctcccaccgtacacgcctaccgcccatttgcgtcaatggggcggagttgttacgacattttggaaagtcccgttgattttggtgccaaaacaaactcccattgacgtcaatggggtggagacttggaaatccccgtgagtcaaaccgctatccacgcccattgatgtactgccaaaaccgcatcaccatggtaatagcgatgactaatacgtagatgtactgccaagtaggaaagtcccataaggtcatgtactgggcataatgccaggcgggccatttaccgtcattgacgtcaatagggggcgtacttggcatatgatacacttgatgtactgccaagtgggcagtttaccgtaaatactccacccattgacgtcaatggaaagtccctattggcgttactatgggaacatacgtcattattgacgtcaatgggcgggggtcgttgggcggtcagccaggcgggccatttaccgtaagttatgtaacgcggaactccatatatgggctatgaactaatgaccccgtaattgattactattacagcctcagaagccatagagcccaccgcatccccagcatgcctgctattgtcttcccaatcctcccccttgctgtcctgccccaccccaccccccagaatagaatgacacctactcagacaatgcgatgcaatttcctcattttattaggaaaggacagtgggagtggcaccttccagggtcaaggaaggcacgggggaggggcaaacaacagatggctggcaactagaaggcacagtcgaggctgatcagcgagctctagagaattgatccccaagcttctacatgggggtagagtcataatcgtgcatcaggatagggcggtggtgctgcagcagcgcgcgaataaactgctgccgccgccgctccgtcctgcaggaatacaacatggcagtggtctcctcagcgatgattcgcaccgcccgcagcataaggcgccttgtcctccgggcacagcagcgcaccctgatctcacttaaatcagcacagtaactgcagcacagcaccacaatattgttcaaaatcccacagtgcaaggcgctgtatccaaagctcatggcggggaccacagaacccacgtggccatcataccacaagcgcaggtagattaagtggcgacccctcataaacacgctggacataaacattacctcttttggcatgttgtaattcaccacctcccggtaccatataaacctctgattaaacatggcgccatccaccaccatcctaaaccagctggccaaaacctgcccgccggctatacactgcagggaaccgggactggaacaatgacagtggagagcccaggactcgtaaccatggatcatcatgctcgtcatgatatcaatgttggcacaacacaggcacacgtgcatacacttcctcaggattacaagctcctcccgcgttagaaccatatcccagggaacaacccattcctgaatcagcgtaaatcccacactgcagggaagacctcgcacgtaactcacgttgtgcattgtcaaagtgttacattcgggcagcagcggatgatcctccagtatggtagcgcgggtttctgtctcaaaaggaggtagacgatccctactgtacggagtgcgccgagacaaccgagatcgtgttggtcgtagtgtcatgccaaatggaacgccggacgtagtcatggtggccagcttggggtagttttcacgacaccttaaatggaagaaaaaaactttgaaccactgtctgaggcttgagaatgaaccaagatccaaactcaaaaagggcaaattccaaggagaattacatcaagtgccaagctggcctaacttcagtctccacccactcagtatggggaaactccatcgcataaaacccctccccccaacctaaagacgacgtactccaaaagctcgagaactaatcgaggtgcctggacggcgcccggtactccgtggagtcacatgaagcgacggctgaggacggaaaggcccttttcctttgtgtgggtgactcacccgcccgctctcccgagcgccgcgtcctccattttgagctccctgcagcagggccgggaagcggccatctttccgctcacgcaactggtgccgaccgggccagccttgccgcccagggcggggcgatacacggcggcgcgaggccaggcaccagagcaggccggccagcttgagactacccccgtccgattctcggtggccgcgctcgcaggccccgcctcgccgaacatgtgcgctgggacgcacgggccccgtcgccgcccgcggccccaaaaaccgaaataccagtgtgcagatcttggcccgcatttacaagactatcttgccagaaaaaaagcgtcgcagcaggtcatcaaaaattttaaatggctagagacttatcgaaagcagcgagacaggcgcgaaggtgccaccagattcgcacgcggcggccccagcgcccaggccaagcctcaactcaagcacgaggcgaaggggctccttaagcgcaaggcctcgaactctcccacccacttccaacccgaagctcgggatcaagaatcacgtactgcagccaggggcgtggaagtaattcaaggcacgcaagggccataacccgtaaagaggccaggcccgcgggaaccacacacggcacttacctgtgttctggcggcaaacccgttgcgaaaaagaacgttcacggcgactactgcacttatatacggttctcccccaccctcgggaaaaaggcggagccagtacacgacatcactttcccagtttaccccgcgccaccttctctaggcaccggttcaattgccgacccctccccccaacttctcggggactgtgggcgatgtgcgctctgcccactgacgggcaccggagcaaattgggcgtggcttaagggtgggaaagaatatataaggtgggggtcttatgtagttttgtatctgttttgcagcagccgccgccgccatgagcaccaactcgtttgatggaagcattgtgagctcatatttgacaacgcgcatgcccccatgggccggggtgcgtcagaatgtgatgggctccagcattgatggtcgccccgtcctgcccgcaaactctactaccttgacctacgagaccgtgtctggaacgccgttggagactgcagcctccgccgccgcttcagccgctgcagccaccgcccgcgggattgtgactgactttgctttcctgagcccgcttgcaagcagtgcagcttcccgttcatccgcccgcgatgacaagttgacggctcttttggcacaattggattctttgacccgggaacttaatgtcgtttctcagcagctgttggatctgcgccagcaggtttctgccctgaaggcttcctcccctcccaatgcggtttaaaacataaataaaaaaccagactctgtttggatttggatcaagcaagtgtcttgctgtctttatttaggggttttgcgcgcgcggtaggcccgggaccagcggtctcggtcgttgagggtcctgtgtattttttccaggacgtggtaaaggtgactctggatgttcagatacatgggcataagcccgtctctggggtggaggtagcaccactgcagagcttcatgctgcggggtggtgttgtagatgatccagtcgtagcaggagcgctgggcgtggtgcctaaaaatgtctttcagtagcaagctgattgccaggggcaggcccttggtgtaagtgtttacaaagcggttaagctgggatgggtgcatacgtggggatatgagatgcatcttggactgtatttttaggttggctatgttcccagccatatccctccggggattcatgttgtgcagaaccaccagcacagtgtatccggtgcacttgggaaatttgtcatgtagcttagaaggaaatgcgtggaagaacttggagacgcccttgtgacctccaagattttccatgcattcgtccataatgatggcaatgggcccacgggcggcggcctgggcgaagatatttctgggatcactaacgtcatagttgtgttccaggatgagatcgtcataggccatttttacaaagcgcgggcggagggtgccagactgcggtataatggttccatccggcccaggggcgtagttaccctcacagatttgcatttcccacgctttgagttcagatggggggatcatgtctacctgcggggcgatgaagaaaacggtttccggggtaggggagatcagctgggaagaaagcaggttcctgagcagctgcgacttaccgcagccggtgggcccgtaaatcacacctattaccgggtgcaactggtagttaagagagctgcagctgccgtcatccctgagcaggggggccacttcgttaagcatgtccctgactcgcatgttttccctgaccaaatccgccagaaggcgctcgccgcccagcgatagcagttcttgcaaggaagcaaagtttttcaacggtttgagaccgtccgccgtaggcatgcttttgagcgtttgaccaagcagttccaggcggtcccacagctcggtcacctgctctacggcatctcgatccagcatatctcctcgtttcgcgggttggggcggctttcgctgtacggcagtagtcggtgctcgtccagacgggccagggtcatgtctttccacgggcgcagggtcctcgtcagcgtagtctgggtcacggtgaaggggtgcgctccgggctgcgcgctggccagggtgcgcttgaggctggtcctgctggtgctgaagcgctgccggtcttcgccctgcgcgtcggccaggtagcatttgaccatggtgtcatagtccagcccctccgcggcgtggcccttggcgcgcagcttgcccttggaggaggcgccgcacgaggggcagtgcagacttttgagggcgtagagcttgggcgcgagaaataccgattccggggagtaggcatccgcgccgcaggccccgcagacggtctcgcattccacgagccaggtgagctctggccgttcggggtcaaaaaccaggtttcccccatgctttttgatgcgtttcttacctctggtttccatgagccggtgtccacgctcggtgacgaaaaggctgtccgtgtccccgtatacagacttgagaggcctgtcctcgagcggtgttccgcggtcctcctcgtatagaaactcggaccactctgagacaaaggctcgcgtccaggccagcacgaaggaggctaagtgggaggggtagcggtcgttgtccactagggggtccactcgctccagggtgtgaagacacatgtcgccctcttcggcatcaaggaaggtgattggtttgtaggtgtaggccacgtgaccgggtgttcctgaaggggggctataaaagggggtgggggcgcgttcgtcctcactctcttccgcatcgctgtctgcgagggccagctgttggggtgagtactccctctgaaaagcgggcatgacttctgcgctaagattgtcagtttccaaaaacgaggaggatttgatattcacctggcccgcggtgatgcctttgagggtggccgcatccatctggtcagaaaagacaatctttttgttgtcaagcttggtggcaaacgacccgtagagggcgttggacagcaacttggcgatggagcgcagggtttggtttttgtcgcgatcggcgcgctccttggccgcgatgtttagctgcacgtattcgcgcgcaacgcaccgccattcgggaaagacggtggtgcgctcgtcgggcaccaggtgcacgcgccaaccgcggttgtgcagggtgacaaggtcaacgctggtggctacctctccgcgtaggcgctcgttggtccagcagaggcggccgcccttgcgcgagcagaatggcggtagggggtctagctgcgtctcgtccggggggtctgcgtccacggtaaagaccccgggcagcaggcgcgcgtcgaagtagtctatcttgcatccttgcaagtctagcgcctgctgccatgcgcgggcggcaagcgcgcgctcgtatgggttgagtgggggaccccatggcatggggtgggtgagcgcggaggcgtacatgccgcaaatgtcgtaaacgtagaggggctctctgagtattccaagatatgtagggtagcatcttccaccgcggatgctggcgcgcacgtaatcgtatagttcgtgcgagggagcgaggaggtcgggaccgaggttgctacgggcgggctgctctgctcggaagactatctgcctgaagatggcatgtgagttggatgatatggttggacgctggaagacgttgaagctggcgtctgtgagacctaccgcgtcacgcacgaaggaggcgtaggagtcgcgcagcttgttgaccagctcggcggtgacctgcacgtctagggcgcagtagtccagggtttccttgatgatgtcatacttatcctgtcccttttttttccacagctcgcggttgaggacaaactcttcgcggtctttccagtactcttggatcggaaacccgtcggcctccgaacggtaagagcctagcatgtagaactggttgacggcctggtaggcgcagcatcccttttctacgggtagcgcgtatgcctgcgcggccttccggagcgaggtgtgggtgagcgcaaaggtgtccctgaccatgactttgaggtactggtatttgaagtcagtgtcgtcgcatccgccctgctcccagagcaaaaagtccgtgcgctttttggaacgcggatttggcagggcgaaggtgacatcgttgaagagtatctttcccgcgcgaggcataaagttgcgtgtgatgcggaagggtcccggcacctcggaacggttgttaattacctgggcggcgagcacgatctcgtcaaagccgttgatgttgtggcccacaatgtaaagttccaagaagcgcgggatgcccttgatggaaggcaattttttaagttcctcgtaggtgagctcttcaggggagctgagcccgtgctctgaaagggcccagtctgcaagatgagggttggaagcgacgaatgagctccacaggtcacgggccattagcatttgcaggtggtcgcgaaaggtcctaaactggcgacctatggccattttttctggggtgatgcagtagaaggtaagcgggtcttgttcccagcggtcccatccaaggttcgcggctaggtctcgcgcggcagtcactagaggctcatctccgccgaacttcatgaccagcatgaagggcacgagctgcttcccaaaggcccccatccaagtataggtctctacatcgtaggtgacaaagagacgctcggtgcgaggatgcgagccgatcgggaagaactggatctcccgccaccaattggaggagtggctattgatgtggtgaaagtagaagtccctgcgacgggccgaacactcgtgctggcttttgtaaaaacgtgcgcagtactggcagcggtgcacgggctgtacatcctgcacgaggttgacctgacgaccgcgcacaaggaagcagagtgggaatttgagcccctcgcctggcgggtttggctggtggtcttctacttcggctgcttgtccttgaccgtctggctgctcgaggggagttacggtggatcggaccaccacgccgcgcgagcccaaagtccagatgtccgcgcgcggcggtcggagcttgatgacaacatcgcgcagatgggagctgtccatggtctggagctcccgcggcgtcaggtcaggcgggagctcctgcaggtttacctcgcatagacgggtcagggcgcgggctagatccaggtgatacctaatttccaggggctggttggtggcggcgtcgatggcttgcaagaggccgcatccccgcggcgcgactacggtaccgcgcggcgggcggtgggccgcgggggtgtccttggatgatgcatctaaaagcggtgacgcgggcgagcccccggaggtagggggggctccggacccgccgggagagggggcaggggcacgtcggcgccgcgcgcgggcaggagctggtgctgcgcgcgtaggttgctggcgaacgcgacgacgcggcggttgatctcctgaatctggcgcctctgcgtgaagacgacgggcccggtgagcttgaacctgaaagagagttcgacagaatcaatttcggtgtcgttgacggcggcctggcgcaaaatctcctgcacgtctcctgagttgtcttgataggcgatctcggccatgaactgctcgatctcttcctcctggagatctccgcgtccggctcgctccacggtggcggcgaggtcgttggaaatgcgggccatgagctgcgagaaggcgttgaggcctccctcgttccagacgcggctgtagaccacgcccccttcggcatcgcgggcgcgcatgaccacctgcgcgagattgagctccacgtgccgggcgaagacggcgtagtttcgcaggcgctgaaagaggtagttgagggtggtggcggtgtgttctgccacgaagaagtacataacccagcgtcgcaacgtggattcgttgatatcccccaaggcctcaaggcgctccatggcctcgtagaagtccacggcgaagttgaaaaactgggagttgcgcgccgacacggttaactcctcctccagaagacggatgagctcggcgacagtgtcgcgcacctcgcgctcaaaggctacaggggcctcttcttcttcttcaatctcctcttccataagggcctccccttcttcttcttctggcggcggtgggggaggggggacacggcggcgacgacggcgcaccgggaggcggtcgacaaagcgctcgatcatctccccgcggcgacggcgcatggtctcggtgacggcgcggccgttctcgcgggggcgcagttggaagacgccgcccgtcatgtcccggttatgggttggcggggggctgccatgcggcagggatacggcgctaacgatgcatctcaacaattgttgtgtaggtactccgccgccgagggacctgagcgagtccgcatcgaccggatcggaaaacctctcgagaaaggcgtctaaccagtcacagtcgcaaggtaggctgagcaccgtggcgggcggcagcgggcggcggtcggggttgtttctggcggaggtgctgctgatgatgtaattaaagtaggcggtcttgagacggcggatggtcgacagaagcaccatgtccttgggtccggcctgctgaatgcgcaggcggtcggccatgccccaggcttcgttttgacatcggcgcaggtctttgtagtagtcttgcatgagcctttctaccggcacttcttcttctccttcctcttgtcctgcatctcttgcatctatcgctgcggcggcggcggagtttggccgtaggtggcgccctcttcctcccatgcgtgtgaccccgaagcccctcatcggctgaagcagggctaggtcggcgacaacgcgctcggctaatatggcctgctgcacctgcgtgagggtagactggaagtcatccatgtccacaaagcggtggtatgcgcccgtgttgatggtgtaagtgcagttggccataacggaccagttaacggtctggtgacccggctgcgagagctcggtgtacctgagacgcgagtaagccctcgagtcaaatacgtagtcgttgcaagtccgcaccaggtactggtatcccaccaaaaagtgcggcggcggctggcggtagaggggccagcgtagggtggccggggctccgggggcgagatcttccaacataaggcgatgatatccgtagatgtacctggacatccaggtgatgccggcggcggtggtggaggcgcgcggaaagtcgcggacgcggttccagatgttgcgcagcggcaaaaagtgctccatggtcgggacgctctggccggtcaggcgcgcgcaatcgttgacgctctagcgtgcaaaaggagagcctgtaagcgggcactcttccgtggtctggtggataaattcgcaagggtatcatggcggacgaccggggttcgagccccgtatccggccgtccgccgtgatccatgcggttaccgcccgcgtgtcgaacccaggtgtgcgacgtcagacaacgggggagtgctccttttggcttccttccaggcgcggcggctgctgcgctagcttttttggccactggccgcgcgcagcgtaagcggttaggctggaaagcgaaagcattaagtggctcgctccctgtagccggagggttattttccaagggttgagtcgcgggacccccggttcgagtctcggaccggccggactgcggcgaacgggggtttgcctccccgtcatgcaagaccccgcttgcaaattcctccggaaacagggacgagccccttttttgcttttcccagatgcatccggtgctgcggcagatgcgcccccctcctcagcagcggcaagagcaagagcagcggcagacatgcagggcaccctcccctcctcctaccgcgtcaggaggggcgacatccgcggttgacgcggcagcagatggtgattacgaacccccgcggcgccgggcccggcactacctggacttggaggagggcgagggcctggcgcggctaggagcgccctctcctgagcggcacccaagggtgcagctgaagcgtgatacgcgtgaggcgtacgtgccgcggcagaacctgtttcgcgaccgcgagggagaggagcccgaggagatgcgggatcgaaagttccacgcagggcgcgagctgcggcatggcctgaatcgcgagcggttgctgcgcgaggaggactttgagcccgacgcgcgaaccgggattagtcccgcgcgcgcacacgtggcggccgccgacctggtaaccgcatacgagcagacggtgaaccaggagattaactttcaaaaaagctttaacaaccacgtgcgtacgcttgtggcgcgcgaggaggtggctataggactgatgcatctgtgggactttgtaagcgcgctggagcaaaacccaaatagcaagccgctcatggcgcagctgttccttatagtgcagcacagcagggacaacgaggcattcagggatgcgctgctaaacatagtagagcccgagggccgctggctgctcgatttgataaacatcctgcagagcatagtggtgcaggagcgcagcttgagcctggctgacaaggtggccgccatcaactattccatgcttagcctgggcaagttttacgcccgcaagatataccataccccttacgttcccatagacaaggaggtaaagatcgaggggttctacatgcgcatggcgctgaaggtgcttaccttgagcgacgacctgggcgtttatcgcaacgagcgcatccacaaggccgtgagcgtgagccggcggcgcgagctcagcgaccgcgagctgatgcacagcctgcaaagggccctggctggcacgggcagcggcgatagagaggccgagtcctactttgacgcgggcgctgacctgcgctgggccccaagccgacgcgccctggaggcagctggggccggacctgggctggcggtggcacccgcgcgcgctggcaacgtcggcggcgtggaggaatatgacgaggacgatgagtacgagccagaggacggcgagtactaagcggtgatgtttctgatcagatgatgcaagacgcaacggacccggcggtgcgggcggcgctgcagagccagccgtccggccttaactccacggacgactggcgccaggtcatggaccgcatcatgtcgctgactgcgcgcaatcctgacgcgttccggcagcagccgcaggccaaccggctctccgcaattctggaagcggtggtcccggcgcgcgcaaaccccacgcacgagaaggtgctggcgatcgtaaacgcgctggccgaaaacagggccatccggcccgacgaggccggcctggtctacgacgcgctgcttcagcgcgtggctcgttacaacagcggcaacgtgcagaccaacctggaccggctggtgggggatgtgcgcgaggccgtggcgcagcgtgagcgcgcgcagcagcagggcaacctgggctccatggttgcactaaacgccttcctgagtacacagcccgccaacgtgccgcggggacaggaggactacaccaactttgtgagcgcactgcggctaatggtgactgagacaccgcaaagtgaggtgtaccagtctgggccagactattttttccagaccagtagacaaggcctgcagaccgtaaacctgagccaggctttcaaaaacttgcaggggctgtggggggtgcgggctcccacaggcgaccgcgcgaccgtgtctagcttgctgacgcccaactcgcgcctgttgctgctgctaatagcgcccttcacggacagtggcagcgtgtcccgggacacatacctaggtcacttgctgacactgtaccgcgaggccataggtcaggcgcatgtggacgagcatactttccaggagattacaagtgtcagccgcgcgctggggcaggaggacacgggcagcctggaggcaaccctaaactacctgctgaccaaccggcggcagaagatcccctcgttgcacagtttaaacagcgaggaggagcgcattttgcgctacgtgcagcagagcgtgagccttaacctgatgcgcgacggggtaacgcccagcgtggcgctggacatgaccgcgcgcaacatggaaccgggcatgtatgcctcaaaccggccgtttatcaaccgcctaatggactacttgcatcgcgcggccgccgtgaaccccgagtatttcaccaatgccatcttgaacccgcactggctaccgccccctggtttctacaccgggggattcgaggtgcccgagggtaacgatggattcctctgggacgacatagacgacagcgtgttttccccgcaaccgcagaccctgctagagttgcaacagcgcgagcaggcagaggcggcgctgcgaaaggaaagcttccgcaggccaagcagcttgtccgatctaggcgctgcggccccgcggtcagatgctagtagcccatttccaagcttgatagggtctcttaccagcactcgcaccacccgcccgcgcctgctgggcgaggaggagtacctaaacaactcgctgctgcagccgcagcgcgaaaaaaacctgcctccggcatttcccaacaacgggatagagagcctagtggacaagatgagtagatggaagacgtacgcgcaggagcacagggacgtgccaggcccgcgcccgcccacccgtcgtcaaaggcacgaccgtcagcggggtctggtgtgggaggacgatgactcggcagacgacagcagcgtcctggatttgggagggagtggcaacccgtttgcgcaccttcgccccaggctggggagaatgttttaaaaaaaaaaaagcatgatgcaaaataaaaaactcaccaaggccatggcaccgagcgttggttttcttgtattccccttagtatgcggcgcgcggcgatgtatgaggaaggtcctcctccctcctacgagagtgtggtgagcgcggcgccagtggcggcggcgctgggttctcccttcgatgctcccctggacccgccgtttgtgcctccgcggtacctgcggcctaccggggggagaaacagcatccgttactctgagttggcacccctattcgacaccacccgtgtgtacctggtggacaacaagtcaacggatgtggcatccctgaactaccagaacgaccacagcaactttctgaccacggtcattcaaaacaatgactacagcccgggggaggcaagcacacagaccatcaatcttgacgaccggtcgcactggggcggcgacctgaaaaccatcctgcataccaacatgccaaatgtgaacgagttcatgtttaccaataagtttaaggcgcgggtgatggtgtcgcgcttgcctactaaggacaatcaggtggagctgaaatacgagtgggtggagttcacgctgcccgagggcaactactccgagaccatgaccatagaccttatgaacaacgcgatcgtggagcactacttgaaagtgggcagacagaacggggttctggaaagcgacatcggggtaaagtttgacacccgcaacttcagactggggtttgaccccgtcactggtcttgtcatgcctggggtatatacaaacgaagccttccatccagacatcattttgctgccaggatgcggggtggacttcacccacagccgcctgagcaacttgttgggcatccgcaagcggcaacccttccaggagggctttaggatcacctacgatgatctggagggtggtaacattcccgcactgttggatgtggacgcctaccaggcgagcttgaaagatgacaccgaacagggcgggggtggcgcaggcggcagcaacagcagtggcagcggcgcggaagagaactccaacgcggcagccgcggcaatgcagccggtggaggacatgaacgatcatgccattcgcggcgacacctttgccacacgggctgaggagaagcgcgctgaggccgaagcagcggccgaagctgccgcccccgctgcgcaacccgaggtcgagaagcctcagaagaaaccggtgatcaaacccctgacagaggacagcaagaaacgcagttacaacctaataagcaatgacagcaccttcacccagtaccgcagctggtaccttgcatacaactacggcgaccctcagaccggaatccgctcatggaccctgctttgcactcctgacgtaacctgcggctcggagcaggtctactggtcgttgccagacatgatgcaagaccccgtgaccttccgctccacgcgccagatcagcaactttccggtggtgggcgccgagctgttgcccgtgcactccaagagcttctacaacgaccaggccgtctactcccaactcatccgccagtttacctctctgacccacgtgttcaatcgctttcccgagaaccagattttggcgcgcccgccagcccccaccatcaccaccgtcagtgaaaacgttcctgctctcacagatcacgggacgctaccgctgcgcaacagcatcggaggagtccagcgagtgaccattactgacgccagacgccgcacctgcccctacgtttacaaggccctgggcatagtctcgccgcgcgtcctatcgagccgcactttttgagcaagcatgtccatccttatatcgcccagcaataacacaggctggggcctgcgcttcccaagcaagatgtttggcggggccaagaagcgctccgaccaacacccagtgcgcgtgcgcgggcactaccgcgcgccctggggcgcgcacaaacgcggccgcactgggcgcaccaccgtcgatgacgccatcgacgcggtggtggaggaggcgcgcaactacacgcccacgccgccaccagtgtccacagtggacgcggccattcagaccgtggtgcgcggagcccggcgctatgctaaaatgaagagacggcggaggcgcgtagcacgtcgccaccgccgccgacccggcactgccgcccaacgcgcggcggcggccctgcttaaccgcgcacgtcgcaccggccgacgggcggccatgcgggccgctcgaaggctggccgcgggtattgtcactgtgccccccaggtccaggcgacgagcggccgccgcagcagccgcggccattagtgctatgactcagggtcgcaggggcaacgtgtattgggtgcgcgactcggttagcggcctgcgcgtgcccgtgcgcacccgccccccgcgcaactagattgcaagaaaaaactacttagactcgtactgttgtatgtatccagcggcggcggcgcgcaacgaagctatgtccaagcgcaaaatcaaagaagagatgctccaggtcatcgcgccggagatctatggccccccgaagaaggaagagcaggattacaagccccgaaagctaaagcgggtcaaaaagaaaaagaaagatgatgatgatgaacttgacgacgaggtggaactgctgcacgctaccgcgcccaggcgacgggtacagtggaaaggtcgacgcgtaaaacgtgttttgcgacccggcaccaccgtagtctttacgcccggtgagcgctccacccgcacctacaagcgcgtgtatgatgaggtgtacggcgacgaggacctgcttgagcaggccaacgagcgcctcggggagtttgcctacggaaagcggcataaggacatgctggcgttgccgctggacgagggcaacccaacacctagcctaaagcccgtaacactgcagcaggtgctgcccgcgcttgcaccgtccgaagaaaagcgcggcctaaagcgcgagtctggtgacttggcacccaccgtgcagctgatggtacccaagcgccagcgactggaagatgtcttggaaaaaatgaccgtggaacctgggctggagcccgaggtccgcgtgcggccaatcaagcaggtggcgccgggactgggcgtgcagaccgtggacgttcagatacccactaccagtagcaccagtattgccaccgccacagagggcatggagacacaaacgtccccggttgcctcagcggtggcggatgccgcggtgcaggcggtcgctgcggccgcgtccaagacctctacggaggtgcaaacggacccgtggatgtttcgcgtttcagccccccggcgcccgcgccgttcgaggaagtacggcgccgccagcgcgctactgcccgaatatgccctacatccttccattgcgcctacccccggctatcgtggctacacctaccgccccagaagacgagcaactacccgacgccgaaccaccactggaacccgccgccgccgtcgccgtcgccagcccgtgctggccccgatttccgtgcgcagggtggctcgcgaaggaggcaggaccctggtgctgccaacagcgcgctaccaccccagcatcgtttaaaagccggtctttgtggttcttgcagatatggccctcacctgccgcctccgtttcccggtgccgggattccgaggaagaatgcaccgtaggaggggcatggccggccacggcctgacgggcggcatgcgtcgtgcgcaccaccggcggcggcgcgcgtcgcaccgtcgcatgcgcggcggtatcctgcccctccttattccactgatcgccgcggcgattggcgccgtgcccggaattgcatccgtggccttgcaggcgcagagacactgattaaaaacaagttgcatgtggaaaaatcaaaataaaaagtctggactctcacgctcgcttggtcctgtaactattttgtagaatggaagacatcaactttgcgtctctggccccgcgacacggctcgcgcccgttcatgggaaactggcaagatatcggcaccagcaatatgagcggtggcgccttcagctggggctcgctgtggagcggcattaaaaatttcggttccaccgttaagaactatggcagcaaggcctggaacagcagcacaggccagatgctgagggataagttgaaagagcaaaatttccaacaaaaggtggtagatggcctggcctctggcattagcggggtggtggacctggccaaccaggcagtgcaaaataagattaacagtaagcttgatccccgccctcccgtagaggagcctccaccggccgtggagacagtgtctccagaggggcgtggcgaaaagcgtccgcgccccgacagggaagaaactctggtgacgcaaatagacgagcctccctcgtacgaggaggcactaaagcaaggcctgcccaccacccgtcccatcgcgcccatggctaccggagtgctgggccagcacacacccgtaacgctggacctgcctccccccgccgacacccagcagaaacctgtgctgccaggcccgaccgccgttgttgtaacccgtcctagccgcgcgtccctgcgccgcgccgccagcggtccgcgatcgttgcggcccgtagccagtggcaactggcaaagcacactgaacagcatcgtgggtctgggggtgcaatccctgaagcgccgacgatgcttctgatagctaacgtgtcgtatgtgtgtcatgtatgcgtccatgtcgccgccagaggagctgctgagccgccgcgcgcccgctttccaagatggctaccccttcgatgatgccgcagtggtcttacatgcacatctcgggccaggacgcctcggagtacctgagccccgggctggtgcagtttgcccgcgccaccgagacgtacttcagcctgaataacaagtttagaaaccccacggtggcgcctacgcacgacgtgaccacagaccggtcccagcgtttgacgctgcggttcatccctgtggaccgtgaggatactgcgtactcgtacaaggcgcggttcaccctagctgtgggtgataaccgtgtgctggacatggcttccacgtactttgacatccgcggcgtgctggacaggggccctacttttaagccctactctggcactgcctacaacgccctggctcccaagggtgccccaaatccttgcgaatgggatgaagctgctactgctcttgaaataaacctagaagaagaggacgatgacaacgaagacgaagtagacgagcaagctgagcagcaaaaaactcacgtatttgggcaggcgccttattctggtataaatattacaaaggagggtattcaaataggtgtcgaaggtcaaacacctaaatatgccgataaaacatttcaacctgaacctcaaataggagaatctcagtggtacgaaacagaaattaatcatgcagctgggagagtcctaaaaaagactaccccaatgaaaccatgttacggttcatatgcaaaacccacaaatgaaaatggagggcaaggcattcttgtaaagcaacaaaatggaaagctagaaagtcaagtggaaatgcaatttttctcaactactgaggcagccgcaggcaatggtgataacttgactcctaaagtggtattgtacagtgaagatgtagatatagaaaccccagacactcatatttcttacatgcccactattaaggaaggtaactcacgagaactaatgggccaacaatctatgcccaacaggcctaattacattgcttttagggacaattttattggtctaatgtattacaacagcacgggtaatatgggtgttctggcgggccaagcatcgcagttgaatgctgttgtagatttgcaagacagaaacacagagctttcataccagcttttgcttgattccattggtgatagaaccaggtacttttctatgtggaatcaggctgttgacagctatgatccagatgttagaattattgaaaatcatggaactgaagatgaacttccaaattactgctttccactgggaggtgtgattaatacagagactcttaccaaggtaaaacctaaaacaggtcaggaaaatggatgggaaaaagatgctacagaattttcagataaaaatgaaataagagttggaaataattttgccatggaaatcaatctaaatgccaacctgtggagaaatttcctgtactccaacatagcgctgtatttgcccgacaagctaaagtacagtccttccaacgtaaaaatttctgataacccaaacacctacgactacatgaacaagcgagtggtggctcccgggctagtggactgctacattaaccttggagcacgctggtcccttgactatatggacaacgtcaacccatttaaccaccaccgcaatgctggcctgcgctaccgctcaatgttgctgggcaatggtcgctatgtgcccttccacatccaggtgcctcagaagttctttgccattaaaaacctccttctcctgccgggctcatacacctacgagtggaacttcaggaaggatgttaacatggttctgcagagctccctaggaaatgacctaagggttgacggagccagcattaagtttgatagcatttgcctttacgccaccttcttccccatggcccacaacaccgcctccacgcttgaggccatgcttagaaacgacaccaacgaccagtcctttaacgactatctctccgccgccaacatgctctaccctatacccgccaacgctaccaacgtgcccatatccatcccctcccgcaactgggcggctttccgcggctgggccttcacgcgccttaagactaaggaaaccccatcactgggctcgggctacgacccttattacacctactctggctctataccctacctagatggaaccttttacctcaaccacacctttaagaaggtggccattacctttgactcttctgtcagctggcctggcaatgaccgcctgcttacccccaacgagtttgaaattaagcgctcagttgacggggagggttacaacgttgcccagtgtaacatgaccaaagactggttcctggtacaaatgctagctaactataacattggctaccagggcttctatatcccagagagctacaaggaccgcatgtactccttctttagaaacttccagcccatgagccgtcaggtggtggatgatactaaatacaaggactaccaacaggtgggcatcctacaccaacacaacaactctggatttgttggctaccttgcccccaccatgcgcgaaggacaggcctaccctgctaacttcccctatccgcttataggcaagaccgcagttgacagcattacccagaaaaagtttctttgcgatcgcaccctttggcgcatcccattctccagtaactttatgtccatgggcgcactcacagacctgggccaaaaccttctctacgccaactccgcccacgcgctagacatgacttttgaggtggatcccatggacgagcccacccttctttatgttttgtttgaagtctttgacgtggtccgtgtgcaccagccgcaccgcggcgtcatcgaaaccgtgtacctgcgcacgcccttctcggccggcaacgccacaacataaagaagcaagcaacatcaacaacagctgccgccatgggctccagtgagcaggaactgaaagccattgtcaaagatcttggttgtgggccatattttttgggcacctatgacaagcgctttccaggctttgtttctccacacaagctcgcctgcgccatagtcaatacggccggtcgcgagactgggggcgtacactggatggcctttgcctggaacccgcactcaaaaacatgctacctctttgagccctttggcttttctgaccagcgactcaagcaggtttaccagtttgagtacgagtcactcctgcgccgtagcgccattgcttcttcccccgaccgctgtataacgctggaaaagtccacccaaagcgtacaggggcccaactcggccgcctgtggactattctgctgcatgtttctccacgcctttgccaactggccccaaactcccatggatcacaaccccaccatgaaccttattaccggggtacccaactccatgctcaacagtccccaggtacagcccaccctgcgtcgcaaccaggaacagctctacagcttcctggagcgccactcgccctacttccgcagccacagtgcgcagattaggagcgccacttctttttgtcacttgaaaaacatgtaaaaataatgtactagagacactttcaataaaggcaaatgcttttatttgtacactctcgggtgattatttacccccacccttgccgtctgcgccgtttaaaaatcaaaggggttctgccgcgcatcgctatgcgccactggcagggacacgttgcgatactggtgtttagtgctccacttaaactcaggcacaaccatccgcggcagctcggtgaagttttcactccacaggctgcgcaccatcaccaacgcgtttagcaggtcgggcgccgatatcttgaagtcgcagttggggcctccgccctgcgcgcgcgagttgcgatacacagggttgcagcactggaacactatcagcgccgggtggtgcacgctggccagcacgctcttgtcggagatcagatccgcgtccaggtcctccgcgttgctcagggcgaacggagtcaactttggtagctgccttcccaaaaagggcgcgtgcccaggctttgagttgcactcgcaccgtagtggcatcaaaaggtgaccgtgcccggtctgggcgttaggatacagcgcctgcataaaagccttgatctgcttaaaagccacctgagcctttgcgccttcagagaagaacatgccgcaagacttgccggaaaactgattggccggacaggccgcgtcgtgcacgcagcaccttgcgtcggtgttggagatctgcaccacatttcggccccaccggttcttcacgatcttggccttgctagactgctccttcagcgcgcgctgcccgttttcgctcgtcacatccatttcaatcacgtgctccttatttatcataatgcttccgtgtagacacttaagctcgccttcgatctcagcgcagcggtgcagccacaacgcgcagcccgtgggctcgtgatgcttgtaggtcacctctgcaaacgactgcaggtacgcctgcaggaatcgccccatcatcgtcacaaaggtcttgttgctggtgaaggtcagctgcaacccgcggtgctcctcgttcagccaggtcttgcatacggccgccagagcttccacttggtcaggcagtagtttgaagttcgcctttagatcgttatccacgtggtacttgtccatcagcgcgcgcgcagcctccatgcccttctcccacgcagacacgatcggcacactcagcgggttcatcaccgtaatttcactttccgcttcgctgggctcttcctcttcctcttgcgtccgcataccacgcgccactgggtcgtcttcattcagccgccgcactgtgcgcttacctcctttgccatgcttgattagcaccggtgggttgctgaaacccaccatttgtagcgccacatcttctctttcttcctcgctgtccacgattacctctggtgatggcgggcgctcgggcttgggagaagggcgcttctttttcttcttgggcgcaatggccaaatccgccgccgaggtcgatggccgcgggctgggtgtgcgcggcaccagcgcgtcttgtgatgagtcttcctcgtcctcggactcgatacgccgcctcatccgcttttttgggggcgcccggggaggcggcggcgacggggacggggacgacacgtcctccatggttgggggacgtcgcgccgcaccgcgtccgcgctcgggggtggtttcgcgctgctcctcttcccgactggccatttccttctcctataggcagaaaaagatcatggagtcagtcgagaagaaggacagcctaaccgccccctctgagttcgccaccaccgcctccaccgatgccgccaacgcgcctaccaccttccccgtcgaggcacccccgcttgaggaggaggaagtgattatcgagcaggacccaggttttgtaagcgaagacgacgaggaccgctcagtaccaacagaggataaaaagcaagaccaggacaacgcagaggcaaacgaggaacaagtcgggcggggggacgaaaggcatggcgactacctagatgtgggagacgacgtgctgttgaagcatctgcagcgccagtgcgccattatctgcgacgcgttgcaagagcgcagcgatgtgcccctcgccatagcggatgtcagccttgcctacgaacgccacctattctcaccgcgcgtaccccccaaacgccaagaaaacggcacatgcgagcccaacccgcgcctcaacttctaccccgtatttgccgtgccagaggtgcttgccacctatcacatctttttccaaaactgcaagatacccctatcctgccgtgccaaccgcagccgagcggacaagcagctggccttgcggcagggcgctgtcatacctgatatcgcctcgctcaacgaagtgccaaaaatctttgagggtcttggacgcgacgagaagcgcgcggcaaacgctctgcaacaggaaaacagcgaaaatgaaagtcactctggagtgttggtggaactcgagggtgacaacgcgcgcctagccgtactaaaacgcagcatcgaggtcacccactttgcctacccggcacttaacctaccccccaaggtcatgagcacagtcatgagtgagctgatcgtgcgccgtgcgcagcccctggagagggatgcaaatttgcaagaacaaacagaggagggcctacccgcagttggcgacgagcagctagcgcgctggcttcaaacgcgcgagcctgccgacttggaggagcgacgcaaactaatgatggccgcagtgctcgttaccgtggagcttgagtgcatgcagcggttctttgctgacccggagatgcagcgcaagctagaggaaacattgcactacacctttcgacagggctacgtacgccaggcctgcaagatctccaacgtggagctctgcaacctggtctcctaccttggaattttgcacgaaaaccgccttgggcaaaacgtgcttcattccacgctcaagggcgaggcgcgccgcgactacgtccgcgactgcgtttacttatttctatgctacacctggcagacggccatgggcgtttggcagcagtgcttggaggagtgcaacctcaaggagctgcagaaactgctaaagcaaaacttgaaggacctatggacggccttcaacgagcgctccgtggccgcgcacctggcggacatcattttccccgaacgcctgcttaaaaccctgcaacagggtctgccagacttcaccagtcaaagcatgttgcagaactttaggaactttatcctagagcgctcaggaatcttgcccgccacctgctgtgcacttcctagcgactttgtgcccattaagtaccgcgaatgccctccgccgctttggggccactgctaccttctgcagctagccaactaccttgcctaccactctgacataatggaagacgtgagcggtgacggtctactggagtgtcactgtcgctgcaacctatgcaccccgcaccgctccctggtttgcaattcgcagctgcttaacgaaagtcaaattatcggtacctttgagctgcagggtccctcgcctgacgaaaagtccgcggctccggggttgaaactcactccggggctgtggacgtcggcttaccttcgcaaatttgtacctgaggactaccacgcccacgagattaggttctacgaagaccaatcccgcccgcctaatgcggagcttaccgcctgcgtcattacccagggccacattcttggccaattgcaagccatcaacaaagcccgccaagagtttctgctacgaaagggacggggggtttacttggacccccagtccggcgaggagctcaacccaatccccccgccgccgcagccctatcagcagcagccgcgggcccttgcttcccaggatggcacccaaaaagaagctgcagctgccgccgccacccacggacgaggaggaatactgggacagtcaggcagaggaggttttggacgaggaggaggaggacatgatggaagactgggagagcctagacgaggaagcttccgaggtcgaagaggtgtcagacgaaacaccgtcaccctcggtcgcattcccctcgccggcgccccagaaatcggcaaccggttccagcatggctacaacctccgctcctcaggcgccgccggcactgcccgttcgccgacccaaccgtagatgggacaccactggaaccagggccggtaagtccaagcagccgccgccgttagcccaagagcaacaacagcgccaaggctaccgctcatggcgcgggcacaagaacgccatagttgcttgcttgcaagactgtgggggcaacatctccttcgcccgccgctttcttctctaccatcacggcgtggccttcccccgtaacatcctgcattactaccgtcatctctacagcccatactgcaccggcggcagcggcagcaacagcagcggccacacagaagcaaaggcgaccggatagcaagactctgacaaagcccaagaaatccacagcggcggcagcagcaggaggaggagcgctgcgtctggcgcccaacgaacccgtatcgacccgcgagcttagaaacaggatttttcccactctgtatgctatatttcaacagagcaggggccaagaacaagagctgaaaataaaaaacaggtctctgcgatccctcacccgcagctgcctgtatcacaaaagcgaagatcagcttcggcgcacgctggaagacgcggaggctctcttcagtaaatactgcgcgctgactcttaaggactagtttcgcgccctttctcaaatttaagcgcgaaaactacgtcatctccagcggccacacccggcgccagcacctgttgtcagcgccattatgagcaaggaaattcccacgccctacatgtggagttaccagccacaaatgggacttgcggctggagctgcccaagactactcaacccgaataaactacatgagcgcgggaccccacatgatatcccgggtcaacggaatacgcgcccaccgaaaccgaattctcctggaacaggcggctattaccaccacacctcgtaataaccttaatccccgtagttggcccgctgccctggtgtaccaggaaagtcccgctcccaccactgtggtacttcccagagacgcccaggccgaagttcagatgactaactcaggggcgcagcttgcgggcggctttcgtcacagggtgcggtcgcccgggcagggtataactcacctgacaatcagagggcgaggtattcagctcaacgacgagtcggtgagctcctcgcttggtctccgtccggacgggacatttcagatcggcggcgccggccgctcttcattcacgcctcgtcaggcaatcctaactctgcagacctcgtcctctgagccgcgctctggaggcattggaactctgcaatttattgaggagtttgtgccatcggtctactttaaccccttctcgggacctcccggccactatccggatcaatttattcctaactttgacgcggtaaaggactcggcggacggctacgactgaatgttaagtggagaggcagagcaactgcgcctgaaacacctggtccactgtcgccgccacaagtgctttgcccgcgactccggtgagttttgctactttgaattgcccgaggatcatatcgagggcccggcgcacggcgtccggcttaccgcccagggagagcttgcccgtagcctgattcgggagtttacccagcgccccctgctagttgagcgggacaggggaccctgtgttctcactgtgatttgcaactgtcctaaccctggattacatcaagatcctctagttaatgtcaggtcgcctaagtcgattaactagagtacccggggatcttattccctttaactaataaaaaaaaataataaagcatcacttacttaaaatcagttagcaaatttctgtccagtttattcagcagcacctccttgccctcctcccagctctggtattgcagcttcctcctggctgcaaactttctccacaatctaaatggaatgtcagtttcctcctgttcctgtccatccgcacccactatcttcatgttgttgcagatgaagcgcgcaagaccgtctgaagataccttcaaccccgtgtatccatatgacacggaaaccggtcctccaactgtgccttttcttactcctccctttgtatcccccaatgggtttcaagagagtccccctggggtactctctttgcgcctatccgaacctctagttacctccaatggcatgcttgcgctcaaaatgggcaacggcctctctctggacgaggccggcaaccttacctcccaaaatgtaaccactgtgagcccacctctcaaaaaaaccaagtcaaacataaacctggaaatatctgcacccctcacagttacctcagaagccctaactgtggctgccgccgcacctctaatggtcgcgggcaacacactcaccatgcaatcacaggccccgctaaccgtgcacgactccaaacttagcattgccacccaaggacccctcacagtgtcagaaggaaagctagccctgcaaacatcaggccccctcaccaccaccgatagcagtacccttactatcactgcctcaccccctctaactactgccactggtagcttgggcattgacttgaaagagcccatttatacacaaaatggaaaactaggactaaagtacggggctcctttgcatgtaacagacgacctaaacactttgaccgtagcaactggtccaggtgtgactattaataatacttccttgcaaactaaagttactggagccttgggttttgattcacaaggcaatatgcaacttaatgtagcaggaggactaaggattgattctcaaaacagacgccttatacttgatgttagttatccgtttgatgctcaaaaccaactaaatctaagactaggacagggccctctttttataaactcagcccacaacttggatattaactacaacaaaggcctttacttgtttacagcttcaaacaattccaaaaagcttgaggttaacctaagcactgccaaggggttgatgtttgacgctacagccatagccattaatgcaggagatgggcttgaatttggttcacctaatgcaccaaacacaaatcccctcaaaacaaaaattggccatggcctagaatttgattcaaacaaggctatggttcctaaactaggaactggccttagttttgacagcacaggtgccattacagtaggaaacaaaaataatgataagctaactttgtggaccggaataaaccctccacctaactgtcaaattgtggaaaacactaatacaaatgatggcaaacttactttagtattagtaaaaaatggagggcttgttaatggctacgtgtctctagttggtgtatcagacactgtgaaccaaatgttcacacaaaagacagcaaacatccaattaagattatattttgactcttctggaaatctattaactgaggaatcagacttaaaaattccacttaaaaataaatcttctacagcgaccagtgaaactgtagccagcagcaaagcctttatgccaagtactacagcttatcccttcaacaccactactagggatagtgaaaactacattcatggaatatgttactacatgactagttatgatagaagtctatttcccttgaacatttctataatgctaaacagccgtatgatttcttccaatgttgcctatgccatacaatttgaatggaatctaaatgcaagtgaatctccagaaagcaacatagctacgctgaccacatccccctttttcttttcttacattacagaagacgacaactaaagaatcgtttgtgttatgtttcaacgtgtttatttttcaattgcagaaaatttcaagtcatttttcattcagtagtatagccccaccaccacatagcttatacagatcaccgtaccttaatcaaacgtttttttttttattccaaaagattatccaaaacctcaaaatgaagatctattaagtgaacgcgctcccctccggtggcgtggtcaaactctacagccaaagaacagataatggcatttgtaagatgttgcacaatggcttccaaaaggcaaacggccctcacgtccaagtggacgtaaaggctaaacccttcagggtgaatctcctctataaacattccagcaccttcaaccatgcccaaataattctcatctcgccaccttctcaatatatctctaagcaaatcccgaatattaagtccggccattgtaaaaatctgctccagagcgccctccaccttcagcctcaagcagcgaatcatgattgcaaaaattcaggttcctcacagacctgtataagattcaaaagcggaacattaacaaaaataccgcgatcccgtaggtcccttcgcagggccagctgaacataatcgtgcaggtctgcacggaccagcgcggccacttccccgccaggaaccatgacaaaagaacccacactgattatgacacgcatactcggagctatgctaaccagcgtagccccgatgtaagcttgttgcatgggcggcgatataaaatgcaaggtgctgctcaaaaaatcaggcaaagcctcgcgcaaaaaagaaagcacatcgtagtcatgctcatgcagataaaggcaggtaagctccggaaccaccacagaaaaagacaccatttttctctcaaacatgtctgcgggtttctgcataaacacaaaataaaataacaaaaaaacatttaaacattagaagcctgtcttacaacaggaaaaacaacccttataagcataagacggactacggccatgccggcgtgaccgtaaaaaaactggtcaccgtgattaaaaagcaccaccgacagctcctcggtcatgtccggagtcataatgtaagactcggtaaacacatcaggttgattcacatcggtcagtgctaaaaagcgaccgaaatagcccgggggaatacatacccgcaggcgtagagacaacattacagcccccataggaggtataacaaaattaataggagagaaaaacacataaacacctgaaaaaccctcctgcctaggcaaaatagcaccctcccgctccagaacaacatacagcgcttccacagcggcagccataacagtcagccttaccagtaaaaaagaaaacctattaaaaaaacaccactcgacacggcaccagctcaatcagtcacagtgtaaaaaagggccaagtgcagagcgagtatatataggactaaaaaatgacgtaacggttaaagtccacaaaaaacacccagaaaaccgcacgcgaacctacgcccagaaacgaaagccaaaaaacccacaacttcctcaaatcgtcacttccgttttcccacgttacgtcacttcccattttaagaaaactacaattcccaacacatacaagttactccgccctaaaacctacgtcacccgccccgttcccacgccccgcgccacgtcacaaactccaccccctcattatcatattggcttcaatccaaaataaggtatattattgatgatg

SEQ ID NO: 14 - DNA, 37105 bp, Artificial Sequence
  Adk35FR-Spike/E4orf6-E4dl355(E4re#9)
ttaattaacatcatcaataatataccttattttggattgaagccaatatgataatgagggggtggagtttgtgacgtggcgcggggcgtgggaacggggcgggtgacgtagtagtgtggcggaagtgtgatgttgcaagtgtggcggaacacatgtaagcgacggatgtggcaaaagtgacgtttttggtgtgcgccggtgtacacaggaagtgacaattttcgcgcggttttaggcggatgttgtagtaaatttgggcgtaaccgagtaagatttggccattttcgcgggaaaactgaataagaggaagtgaaatctgaataattttgtgttactcatagcgcgtaataatttctgtaatagtaatcaattacggggtcattagttcatagcccatatatggagttccgcgttacataacttacggtaaatggcccgcctggctgaccgcccaacgacccccgcccattgacgtcaataatgacgtatgttcccatagtaacgccaatagggactttccattgacgtcaatgggtggagtatttacggtaaactgcccacttggcagtacatcaagtgtatcatatgccaagtacgccccctattgacgtcaatgacggtaaatggcccgcctggcattatgcccagtacatgaccttatgggactttcctacttggcagtacatctacgtattagtcatcgctattaccatggtgatgcggttttggcagtacatcaatgggcgtggatagcggtttgactcacggggatttccaagtctccaccccattgacgtcaatgggagtttgttttggcaccaaaatcaacgggactttccaaaatgtcgtaacaactccgccccattgacgcaaatgggcggtaggcgtgtacggtgggaggtctatataagcagagctctccctatcagtgatagagatctccctatcagtgatagagatcgtcgacgagctcgtttagtgaaccgtcagatcgcctggagacgccatccacgctgttttgacctccatagaagacaccgggaccgatccagcctccgatttgccaccatgtttgtgttcctggtgctgctgccactggtgtccagccagtgtgtgaacctgaccaccaggacccaacttcctcctgcctacaccaactccttcaccaggggagtctactaccctgacaaggtgttcaggtcctctgtgctgcacagcacccaggacctgttcctgccattcttcagcaatgtgacctggttccatgccatccatgtgtctggcaccaatggcaccaagaggtttgacaaccctgtgctgccattcaatgatggagtctactttgccagcacagagaagagcaacatcatcaggggctggatttttggcaccaccctggacagcaagacccagtccctgctgattgtgaacaatgccaccaatgtggtgattaaggtgtgtgagttccagttctgtaatgacccattcctgggagtctactaccacaagaacaacaagtcctggatggagtctgagttcagggtctactcctctgccaacaactgtacctttgaatatgtgagccaaccattcctgatggacttggagggcaagcagggcaacttcaagaacctgagggagtttgtgttcaagaacattgatggctacttcaagatttacagcaaacacacaccaatcaacctggtgagggacctgccacagggcttctctgccttggaaccactggtggacctgccaattggcatcaacatcaccaggttccagaccctgctggctctgcacaggtcctacctgacacctggagactcctcctctggctggacagcaggagcagcagcctactatgtgggctacctccaaccaaggaccttcctgctgaaatacaatgagaatggcaccatcacagatgctgtggactgtgccctggacccactgtctgagaccaagtgtaccctgaaatccttcacagtggagaagggcatctaccagaccagcaacttcagggtccaaccaacagagagcattgtgaggtttccaaacatcaccaacctgtgtccatttggagaggtgttcaatgccaccaggtttgcctctgtctatgcctggaacaggaagaggattagcaactgtgtggctgactactctgtgctctacaactctgcctccttcagcaccttcaagtgttatggagtgagcccaaccaaactgaatgacctgtgtttcaccaatgtctatgctgactcctttgtgattaggggagatgaggtgagacagattgcccctggacaaacaggcaagattgctgactacaactacaaactgcctgatgacttcacaggctgtgtgattgcctggaacagcaacaacctggacagcaaggtgggaggcaactacaactacctctacagactgttcaggaagagcaacctgaaaccatttgagagggacatcagcacagagatttaccaggctggcagcacaccatgtaatggagtggagggcttcaactgttactttccactccaatcctatggcttccaaccaaccaatggagtgggctaccaaccatacagggtggtggtgctgtcctttgaactgctccatgcccctgccacagtgtgtggaccaaagaagagcaccaacctggtgaagaacaagtgtgtgaacttcaacttcaatggactgacaggcacaggagtgctgacagagagcaacaagaagttcctgccattccaacagtttggcagggacattgctgacaccacagatgctgtgagggacccacagaccttggagattctggacatcacaccatgttcctttggaggagtgtctgtgattacacctggcaccaacaccagcaaccaggtggctgtgctctaccaggatgtgaactgtactgaggtgcctgtggctatccatgctgaccaacttacaccaacctggagggtctacagcacaggcagcaatgtgttccagaccagggctggctgtctgattggagcagagcatgtgaacaactcctatgagtgtgacatcccaattggagcaggcatctgtgcctcctaccagacccagaccggtggcggtgggtcgaggtctgtggcaagccagagcatcattgcctacacaatgagtctgggagcagagaactctgtggcttacagcaacaacagcattgccatcccaaccaacttcaccatctctgtgaccacagagattctgcctgtgagtatgaccaagacctctgtggactgtacaatgtatatctgtggagacagcacagagtgtagcaacctgctgctccaatatggctccttctgtacccaacttaacagggctctgacaggcattgctgtggaacaggacaagaacacccaggaggtgtttgcccaggtgaagcagatttacaagacacctccaatcaaggactttggaggcttcaacttcagccagattctgcctgacccaagcaagccaagcaagaggtccttcattgaggacctgctgttcaacaaggtgaccctggctgatgctggcttcatcaagcaatatggagactgtctgggagacattgctgccagggacctgatttgtgcccagaagttcaatggactgacagtgctgcctccactgctgacagatgagatgattgcccaatacacctctgccctgctggctggcaccatcacctctggctggacctttggagcaggagcagccctccaaatcccatttgctatgcagatggcttacaggttcaatggcattggagtgacccagaatgtgctctatgagaaccagaaactgattgccaaccagttcaactctgccattggcaagattcaggactccctgtccagcacagcctctgccctgggcaaactccaagatgtggtgaaccagaatgcccaggctctgaacaccctggtgaagcaactttccagcaactttggagccatctcctctgtgctgaatgacatcctgagcagactggacaaggtggaggctgaggtccagattgacagactgattacaggcagactccaatccctccaaacctatgtgacccaacaacttatcagggctgctgagattagggcatctgccaacctggctgccaccaagatgagtgagtgtgtgctgggacaaagcaagagggtggacttctgtggcaagggctaccacctgatgagttttccacagtctgcccctcatggagtggtgttcctgcatgtgacctatgtgcctgcccaggagaagaacttcaccacagcccctgccatctgccatgatggcaaggctcactttccaagggagggagtgtttgtgagcaatggcacccactggtttgtgacccagaggaacttctatgaaccacagattatcaccacagacaacacctttgtgtctggcaactgtgatgtggtgattggcattgtgaacaacacagtctatgacccactccaacctgaactggactccttcaaggaggaactggacaaatacttcaagaaccacaccagccctgatgtggacctgggagacatctctggcatcaatgcctctgtggtgaacatccagaaggagattgacagactgaatgaggtggctaagaacctgaatgagtccctgattgacctccaagaactgggcaaatatgaacaatacatcaagtggccatgaaaattgatcataatcagccataccacatttgtagaggttttacttgctttaaaaaacctcccacacctccccctgaacctgaaacataaaatgaatgcaattgttgttgttaacttgtttattgcagcttataatggttacaaataaagcaatagcatcacaaatttcacaaataaagcatttttttcactgcattctagttgtggtttgtccaaactcatcaatgtatcttaacgcggatccctcagaagccatagagcccaccgcatccccagcatgcctgctattgtcttcccaatcctcccccttgctgtcctgccccaccccaccccccagaatagaatgacacctactcagacaatgcgatgcaatttcctcattttattaggaaaggacagtgggagtggcaccttccagggtcaaggaaggcacgggggaggggcaaacaacagatggctggcaactagaaggcacagtcgaggctgatcagcgagctctagagaattgatccccaagcttctacatgggggtagagtcataatcgtgcatcaggatagggcggtggtgctgcagcagcgcgcgaataaactgctgccgccgccgctccgtcctgcaggaatacaacatggcagtggtctcctcagcgatgattcgcaccgcccgcagcataaggcgccttgtcctccgggcacagcagcgcaccctgatctcacttaaatcagcacagtaactgcagcacagcaccacaatattgttcaaaatcccacagtgcaaggcgctgtatccaaagctcatggcggggaccacagaacccacgtggccatcataccacaagcgcaggtagattaagtggcgacccctcataaacacgctggacataaacattacctcttttggcatgttgtaattcaccacctcccggtaccatataaacctctgattaaacatggcgccatccaccaccatcctaaaccagctggccaaaacctgcccgccggctatacactgcagggaaccgggactggaacaatgacagtggagagcccaggactcgtaaccatggatcatcatgctcgtcatgatatcaatgttggcacaacacaggcacacgtgcatacacttcctcaggattacaagctcctcccgcgttagaaccatatcccagggaacaacccattcctgaatcagcgtaaatcccacactgcagggaagacctcgcacgtaactcacgttgtgcattgtcaaagtgttacattcgggcagcagcggatgatcctccagtatggtagcgcgggtttctgtctcaaaaggaggtagacgatccctactgtacggagtgcgccgagacaaccgagatcgtgttggtcgtagtgtcatgccaaatggaacgccggacgtagtcatggtggccagcttggggtagttttcacgacaccttaaatggaagaaaaaaactttgaaccactgtctgaggcttgagaatgaaccaagatccaaactcaaaaagggcaaattccaaggagaattacatcaagtgccaagctggcctaacttcagtctccacccactcagtatggggaaactccatcgcataaaacccctccccccaacctaaagacgacgtactccaaaagctcgagaactaatcgaggtgcctggacggcgcccggtactccgtggagtcacatgaagcgacggctgaggacggaaaggcccttttcctttgtgtgggtgactcacccgcccgctctcccgagcgccgcgtcctccattttgagctccctgcagcagggccgggaagcggccatctttccgctcacgcaactggtgccgaccgggccagccttgccgcccagggcggggcgatacacggcggcgcgaggccaggcaccagagcaggccggccagcttgagactacccccgtccgattctcggtggccgcgctcgcaggccccgcctcgccgaacatgtgcgctgggacgcacgggccccgtcgccgcccgcggccccaaaaaccgaaataccagtgtgcagatcttggcccgcatttacaagactatcttgccagaaaaaaagcgtcgcagcaggtcatcaaaaattttaaatggctagagacttatcgaaagcagcgagacaggcgcgaaggtgccaccagattcgcacgcggcggccccagcgcccaggccaagcctcaactcaagcacgaggcgaaggggctccttaagcgcaaggcctcgaactctcccacccacttccaacccgaagctcgggatcaagaatcacgtactgcagccaggggcgtggaagtaattcaaggcacgcaagggccataacccgtaaagaggccaggcccgcgggaaccacacacggcacttacctgtgttctggcggcaaacccgttgcgaaaaagaacgttcacggcgactactgcacttatatacggttctcccccaccctcgggaaaaaggcggagccagtacacgacatcactttcccagtttaccccgcgccaccttctctaggcaccggttcaattgccgacccctccccccaacttctcggggactgtgggcgatgtgcgctctgcccactgacgggcaccggagcaaattgggcgtggcttaagggtgggaaagaatatataaggtgggggtcttatgtagttttgtatctgttttgcagcagccgccgccgccatgagcaccaactcgtttgatggaagcattgtgagctcatatttgacaacgcgcatgcccccatgggccggggtgcgtcagaatgtgatgggctccagcattgatggtcgccccgtcctgcccgcaaactctactaccttgacctacgagaccgtgtctggaacgccgttggagactgcagcctccgccgccgcttcagccgctgcagccaccgcccgcgggattgtgactgactttgctttcctgagcccgcttgcaagcagtgcagcttcccgttcatccgcccgcgatgacaagttgacggctcttttggcacaattggattctttgacccgggaacttaatgtcgtttctcagcagctgttggatctgcgccagcaggtttctgccctgaaggcttcctcccctcccaatgcggtttaaaacataaataaaaaaccagactctgtttggatttggatcaagcaagtgtcttgctgtctttatttaggggttttgcgcgcgcggtaggcccgggaccagcggtctcggtcgttgagggtcctgtgtattttttccaggacgtggtaaaggtgactctggatgttcagatacatgggcataagcccgtctctggggtggaggtagcaccactgcagagcttcatgctgcggggtggtgttgtagatgatccagtcgtagcaggagcgctgggcgtggtgcctaaaaatgtctttcagtagcaagctgattgccaggggcaggcccttggtgtaagtgtttacaaagcggttaagctgggatgggtgcatacgtggggatatgagatgcatcttggactgtatttttaggttggctatgttcccagccatatccctccggggattcatgttgtgcagaaccaccagcacagtgtatccggtgcacttgggaaatttgtcatgtagcttagaaggaaatgcgtggaagaacttggagacgcccttgtgacctccaagattttccatgcattcgtccataatgatggcaatgggcccacgggcggcggcctgggcgaagatatttctgggatcactaacgtcatagttgtgttccaggatgagatcgtcataggccatttttacaaagcgcgggcggagggtgccagactgcggtataatggttccatccggcccaggggcgtagttaccctcacagatttgcatttcccacgctttgagttcagatggggggatcatgtctacctgcggggcgatgaagaaaacggtttccggggtaggggagatcagctgggaagaaagcaggttcctgagcagctgcgacttaccgcagccggtgggcccgtaaatcacacctattaccgggtgcaactggtagttaagagagctgcagctgccgtcatccctgagcaggggggccacttcgttaagcatgtccctgactcgcatgttttccctgaccaaatccgccagaaggcgctcgccgcccagcgatagcagttcttgcaaggaagcaaagtttttcaacggtttgagaccgtccgccgtaggcatgcttttgagcgtttgaccaagcagttccaggcggtcccacagctcggtcacctgctctacggcatctcgatccagcatatctcctcgtttcgcgggttggggcggctttcgctgtacggcagtagtcggtgctcgtccagacgggccagggtcatgtctttccacgggcgcagggtcctcgtcagcgtagtctgggtcacggtgaaggggtgcgctccgggctgcgcgctggccagggtgcgcttgaggctggtcctgctggtgctgaagcgctgccggtcttcgccctgcgcgtcggccaggtagcatttgaccatggtgtcatagtccagcccctccgcggcgtggcccttggcgcgcagcttgcccttggaggaggcgccgcacgaggggcagtgcagacttttgagggcgtagagcttgggcgcgagaaataccgattccggggagtaggcatccgcgccgcaggccccgcagacggtctcgcattccacgagccaggtgagctctggccgttcggggtcaaaaaccaggtttcccccatgctttttgatgcgtttcttacctctggtttccatgagccggtgtccacgctcggtgacgaaaaggctgtccgtgtccccgtatacagacttgagaggcctgtcctcgagcggtgttccgcggtcctcctcgtatagaaactcggaccactctgagacaaaggctcgcgtccaggccagcacgaaggaggctaagtgggaggggtagcggtcgttgtccactagggggtccactcgctccagggtgtgaagacacatgtcgccctcttcggcatcaaggaaggtgattggtttgtaggtgtaggccacgtgaccgggtgttcctgaaggggggctataaaagggggtgggggcgcgttcgtcctcactctcttccgcatcgctgtctgcgagggccagctgttggggtgagtactccctctgaaaagcgggcatgacttctgcgctaagattgtcagtttccaaaaacgaggaggatttgatattcacctggcccgcggtgatgcctttgagggtggccgcatccatctggtcagaaaagacaatctttttgttgtcaagcttggtggcaaacgacccgtagagggcgttggacagcaacttggcgatggagcgcagggtttggtttttgtcgcgatcggcgcgctccttggccgcgatgtttagctgcacgtattcgcgcgcaacgcaccgccattcgggaaagacggtggtgcgctcgtcgggcaccaggtgcacgcgccaaccgcggttgtgcagggtgacaaggtcaacgctggtggctacctctccgcgtaggcgctcgttggtccagcagaggcggccgcccttgcgcgagcagaatggcggtagggggtctagctgcgtctcgtccggggggtctgcgtccacggtaaagaccccgggcagcaggcgcgcgtcgaagtagtctatcttgcatccttgcaagtctagcgcctgctgccatgcgcgggcggcaagcgcgcgctcgtatgggttgagtgggggaccccatggcatggggtgggtgagcgcggaggcgtacatgccgcaaatgtcgtaaacgtagaggggctctctgagtattccaagatatgtagggtagcatcttccaccgcggatgctggcgcgcacgtaatcgtatagttcgtgcgagggagcgaggaggtcgggaccgaggttgctacgggcgggctgctctgctcggaagactatctgcctgaagatggcatgtgagttggatgatatggttggacgctggaagacgttgaagctggcgtctgtgagacctaccgcgtcacgcacgaaggaggcgtaggagtcgcgcagcttgttgaccagctcggcggtgacctgcacgtctagggcgcagtagtccagggtttccttgatgatgtcatacttatcctgtcccttttttttccacagctcgcggttgaggacaaactcttcgcggtctttccagtactcttggatcggaaacccgtcggcctccgaacggtaagagcctagcatgtagaactggttgacggcctggtaggcgcagcatcccttttctacgggtagcgcgtatgcctgcgcggccttccggagcgaggtgtgggtgagcgcaaaggtgtccctgaccatgactttgaggtactggtatttgaagtcagtgtcgtcgcatccgccctgctcccagagcaaaaagtccgtgcgctttttggaacgcggatttggcagggcgaaggtgacatcgttgaagagtatctttcccgcgcgaggcataaagttgcgtgtgatgcggaagggtcccggcacctcggaacggttgttaattacctgggcggcgagcacgatctcgtcaaagccgttgatgttgtggcccacaatgtaaagttccaagaagcgcgggatgcccttgatggaaggcaattttttaagttcctcgtaggtgagctcttcaggggagctgagcccgtgctctgaaagggcccagtctgcaagatgagggttggaagcgacgaatgagctccacaggtcacgggccattagcatttgcaggtggtcgcgaaaggtcctaaactggcgacctatggccattttttctggggtgatgcagtagaaggtaagcgggtcttgttcccagcggtcccatccaaggttcgcggctaggtctcgcgcggcagtcactagaggctcatctccgccgaacttcatgaccagcatgaagggcacgagctgcttcccaaaggcccccatccaagtataggtctctacatcgtaggtgacaaagagacgctcggtgcgaggatgcgagccgatcgggaagaactggatctcccgccaccaattggaggagtggctattgatgtggtgaaagtagaagtccctgcgacgggccgaacactcgtgctggcttttgtaaaaacgtgcgcagtactggcagcggtgcacgggctgtacatcctgcacgaggttgacctgacgaccgcgcacaaggaagcagagtgggaatttgagcccctcgcctggcgggtttggctggtggtcttctacttcggctgcttgtccttgaccgtctggctgctcgaggggagttacggtggatcggaccaccacgccgcgcgagcccaaagtccagatgtccgcgcgcggcggtcggagcttgatgacaacatcgcgcagatgggagctgtccatggtctggagctcccgcggcgtcaggtcaggcgggagctcctgcaggtttacctcgcatagacgggtcagggcgcgggctagatccaggtgatacctaatttccaggggctggttggtggcggcgtcgatggcttgcaagaggccgcatccccgcggcgcgactacggtaccgcgcggcgggcggtgggccgcgggggtgtccttggatgatgcatctaaaagcggtgacgcgggcgagcccccggaggtagggggggctccggacccgccgggagagggggcaggggcacgtcggcgccgcgcgcgggcaggagctggtgctgcgcgcgtaggttgctggcgaacgcgacgacgcggcggttgatctcctgaatctggcgcctctgcgtgaagacgacgggcccggtgagcttgaacctgaaagagagttcgacagaatcaatttcggtgtcgttgacggcggcctggcgcaaaatctcctgcacgtctcctgagttgtcttgataggcgatctcggccatgaactgctcgatctcttcctcctggagatctccgcgtccggctcgctccacggtggcggcgaggtcgttggaaatgcgggccatgagctgcgagaaggcgttgaggcctccctcgttccagacgcggctgtagaccacgcccccttcggcatcgcgggcgcgcatgaccacctgcgcgagattgagctccacgtgccgggcgaagacggcgtagtttcgcaggcgctgaaagaggtagttgagggtggtggcggtgtgttctgccacgaagaagtacataacccagcgtcgcaacgtggattcgttgatatcccccaaggcctcaaggcgctccatggcctcgtagaagtccacggcgaagttgaaaaactgggagttgcgcgccgacacggttaactcctcctccagaagacggatgagctcggcgacagtgtcgcgcacctcgcgctcaaaggctacaggggcctcttcttcttcttcaatctcctcttccataagggcctccccttcttcttcttctggcggcggtgggggaggggggacacggcggcgacgacggcgcaccgggaggcggtcgacaaagcgctcgatcatctccccgcggcgacggcgcatggtctcggtgacggcgcggccgttctcgcgggggcgcagttggaagacgccgcccgtcatgtcccggttatgggttggcggggggctgccatgcggcagggatacggcgctaacgatgcatctcaacaattgttgtgtaggtactccgccgccgagggacctgagcgagtccgcatcgaccggatcggaaaacctctcgagaaaggcgtctaaccagtcacagtcgcaaggtaggctgagcaccgtggcgggcggcagcgggcggcggtcggggttgtttctggcggaggtgctgctgatgatgtaattaaagtaggcggtcttgagacggcggatggtcgacagaagcaccatgtccttgggtccggcctgctgaatgcgcaggcggtcggccatgccccaggcttcgttttgacatcggcgcaggtctttgtagtagtcttgcatgagcctttctaccggcacttcttcttctccttcctcttgtcctgcatctcttgcatctatcgctgcggcggcggcggagtttggccgtaggtggcgccctcttcctcccatgcgtgtgaccccgaagcccctcatcggctgaagcagggctaggtcggcgacaacgcgctcggctaatatggcctgctgcacctgcgtgagggtagactggaagtcatccatgtccacaaagcggtggtatgcgcccgtgttgatggtgtaagtgcagttggccataacggaccagttaacggtctggtgacccggctgcgagagctcggtgtacctgagacgcgagtaagccctcgagtcaaatacgtagtcgttgcaagtccgcaccaggtactggtatcccaccaaaaagtgcggcggcggctggcggtagaggggccagcgtagggtggccggggctccgggggcgagatcttccaacataaggcgatgatatccgtagatgtacctggacatccaggtgatgccggcggcggtggtggaggcgcgcggaaagtcgcggacgcggttccagatgttgcgcagcggcaaaaagtgctccatggtcgggacgctctggccggtcaggcgcgcgcaatcgttgacgctctagcgtgcaaaaggagagcctgtaagcgggcactcttccgtggtctggtggataaattcgcaagggtatcatggcggacgaccggggttcgagccccgtatccggccgtccgccgtgatccatgcggttaccgcccgcgtgtcgaacccaggtgtgcgacgtcagacaacgggggagtgctccttttggcttccttccaggcgcggcggctgctgcgctagcttttttggccactggccgcgcgcagcgtaagcggttaggctggaaagcgaaagcattaagtggctcgctccctgtagccggagggttattttccaagggttgagtcgcgggacccccggttcgagtctcggaccggccggactgcggcgaacgggggtttgcctccccgtcatgcaagaccccgcttgcaaattcctccggaaacagggacgagccccttttttgcttttcccagatgcatccggtgctgcggcagatgcgcccccctcctcagcagcggcaagagcaagagcagcggcagacatgcagggcaccctcccctcctcctaccgcgtcaggaggggcgacatccgcggttgacgcggcagcagatggtgattacgaacccccgcggcgccgggcccggcactacctggacttggaggagggcgagggcctggcgcggctaggagcgccctctcctgagcggcacccaagggtgcagctgaagcgtgatacgcgtgaggcgtacgtgccgcggcagaacctgtttcgcgaccgcgagggagaggagcccgaggagatgcgggatcgaaagttccacgcagggcgcgagctgcggcatggcctgaatcgcgagcggttgctgcgcgaggaggactttgagcccgacgcgcgaaccgggattagtcccgcgcgcgcacacgtggcggccgccgacctggtaaccgcatacgagcagacggtgaaccaggagattaactttcaaaaaagctttaacaaccacgtgcgtacgcttgtggcgcgcgaggaggtggctataggactgatgcatctgtgggactttgtaagcgcgctggagcaaaacccaaatagcaagccgctcatggcgcagctgttccttatagtgcagcacagcagggacaacgaggcattcagggatgcgctgctaaacatagtagagcccgagggccgctggctgctcgatttgataaacatcctgcagagcatagtggtgcaggagcgcagcttgagcctggctgacaaggtggccgccatcaactattccatgcttagcctgggcaagttttacgcccgcaagatataccataccccttacgttcccatagacaaggaggtaaagatcgaggggttctacatgcgcatggcgctgaaggtgcttaccttgagcgacgacctgggcgtttatcgcaacgagcgcatccacaaggccgtgagcgtgagccggcggcgcgagctcagcgaccgcgagctgatgcacagcctgcaaagggccctggctggcacgggcagcggcgatagagaggccgagtcctactttgacgcgggcgctgacctgcgctgggccccaagccgacgcgccctggaggcagctggggccggacctgggctggcggtggcacccgcgcgcgctggcaacgtcggcggcgtggaggaatatgacgaggacgatgagtacgagccagaggacggcgagtactaagcggtgatgtttctgatcagatgatgcaagacgcaacggacccggcggtgcgggcggcgctgcagagccagccgtccggccttaactccacggacgactggcgccaggtcatggaccgcatcatgtcgctgactgcgcgcaatcctgacgcgttccggcagcagccgcaggccaaccggctctccgcaattctggaagcggtggtcccggcgcgcgcaaaccccacgcacgagaaggtgctggcgatcgtaaacgcgctggccgaaaacagggccatccggcccgacgaggccggcctggtctacgacgcgctgcttcagcgcgtggctcgttacaacagcggcaacgtgcagaccaacctggaccggctggtgggggatgtgcgcgaggccgtggcgcagcgtgagcgcgcgcagcagcagggcaacctgggctccatggttgcactaaacgccttcctgagtacacagcccgccaacgtgccgcggggacaggaggactacaccaactttgtgagcgcactgcggctaatggtgactgagacaccgcaaagtgaggtgtaccagtctgggccagactattttttccagaccagtagacaaggcctgcagaccgtaaacctgagccaggctttcaaaaacttgcaggggctgtggggggtgcgggctcccacaggcgaccgcgcgaccgtgtctagcttgctgacgcccaactcgcgcctgttgctgctgctaatagcgcccttcacggacagtggcagcgtgtcccgggacacatacctaggtcacttgctgacactgtaccgcgaggccataggtcaggcgcatgtggacgagcatactttccaggagattacaagtgtcagccgcgcgctggggcaggaggacacgggcagcctggaggcaaccctaaactacctgctgaccaaccggcggcagaagatcccctcgttgcacagtttaaacagcgaggaggagcgcattttgcgctacgtgcagcagagcgtgagccttaacctgatgcgcgacggggtaacgcccagcgtggcgctggacatgaccgcgcgcaacatggaaccgggcatgtatgcctcaaaccggccgtttatcaaccgcctaatggactacttgcatcgcgcggccgccgtgaaccccgagtatttcaccaatgccatcttgaacccgcactggctaccgccccctggtttctacaccgggggattcgaggtgcccgagggtaacgatggattcctctgggacgacatagacgacagcgtgttttccccgcaaccgcagaccctgctagagttgcaacagcgcgagcaggcagaggcggcgctgcgaaaggaaagcttccgcaggccaagcagcttgtccgatctaggcgctgcggccccgcggtcagatgctagtagcccatttccaagcttgatagggtctcttaccagcactcgcaccacccgcccgcgcctgctgggcgaggaggagtacctaaacaactcgctgctgcagccgcagcgcgaaaaaaacctgcctccggcatttcccaacaacgggatagagagcctagtggacaagatgagtagatggaagacgtacgcgcaggagcacagggacgtgccaggcccgcgcccgcccacccgtcgtcaaaggcacgaccgtcagcggggtctggtgtgggaggacgatgactcggcagacgacagcagcgtcctggatttgggagggagtggcaacccgtttgcgcaccttcgccccaggctggggagaatgttttaaaaaaaaaaaagcatgatgcaaaataaaaaactcaccaaggccatggcaccgagcgttggttttcttgtattccccttagtatgcggcgcgcggcgatgtatgaggaaggtcctcctccctcctacgagagtgtggtgagcgcggcgccagtggcggcggcgctgggttctcccttcgatgctcccctggacccgccgtttgtgcctccgcggtacctgcggcctaccggggggagaaacagcatccgttactctgagttggcacccctattcgacaccacccgtgtgtacctggtggacaacaagtcaacggatgtggcatccctgaactaccagaacgaccacagcaactttctgaccacggtcattcaaaacaatgactacagcccgggggaggcaagcacacagaccatcaatcttgacgaccggtcgcactggggcggcgacctgaaaaccatcctgcataccaacatgccaaatgtgaacgagttcatgtttaccaataagtttaaggcgcgggtgatggtgtcgcgcttgcctactaaggacaatcaggtggagctgaaatacgagtgggtggagttcacgctgcccgagggcaactactccgagaccatgaccatagaccttatgaacaacgcgatcgtggagcactacttgaaagtgggcagacagaacggggttctggaaagcgacatcggggtaaagtttgacacccgcaacttcagactggggtttgaccccgtcactggtcttgtcatgcctggggtatatacaaacgaagccttccatccagacatcattttgctgccaggatgcggggtggacttcacccacagccgcctgagcaacttgttgggcatccgcaagcggcaacccttccaggagggctttaggatcacctacgatgatctggagggtggtaacattcccgcactgttggatgtggacgcctaccaggcgagcttgaaagatgacaccgaacagggcgggggtggcgcaggcggcagcaacagcagtggcagcggcgcggaagagaactccaacgcggcagccgcggcaatgcagccggtggaggacatgaacgatcatgccattcgcggcgacacctttgccacacgggctgaggagaagcgcgctgaggccgaagcagcggccgaagctgccgcccccgctgcgcaacccgaggtcgagaagcctcagaagaaaccggtgatcaaacccctgacagaggacagcaagaaacgcagttacaacctaataagcaatgacagcaccttcacccagtaccgcagctggtaccttgcatacaactacggcgaccctcagaccggaatccgctcatggaccctgctttgcactcctgacgtaacctgcggctcggagcaggtctactggtcgttgccagacatgatgcaagaccccgtgaccttccgctccacgcgccagatcagcaactttccggtggtgggcgccgagctgttgcccgtgcactccaagagcttctacaacgaccaggccgtctactcccaactcatccgccagtttacctctctgacccacgtgttcaatcgctttcccgagaaccagattttggcgcgcccgccagcccccaccatcaccaccgtcagtgaaaacgttcctgctctcacagatcacgggacgctaccgctgcgcaacagcatcggaggagtccagcgagtgaccattactgacgccagacgccgcacctgcccctacgtttacaaggccctgggcatagtctcgccgcgcgtcctatcgagccgcactttttgagcaagcatgtccatccttatatcgcccagcaataacacaggctggggcctgcgcttcccaagcaagatgtttggcggggccaagaagcgctccgaccaacacccagtgcgcgtgcgcgggcactaccgcgcgccctggggcgcgcacaaacgcggccgcactgggcgcaccaccgtcgatgacgccatcgacgcggtggtggaggaggcgcgcaactacacgcccacgccgccaccagtgtccacagtggacgcggccattcagaccgtggtgcgcggagcccggcgctatgctaaaatgaagagacggcggaggcgcgtagcacgtcgccaccgccgccgacccggcactgccgcccaacgcgcggcggcggccctgcttaaccgcgcacgtcgcaccggccgacgggcggccatgcgggccgctcgaaggctggccgcgggtattgtcactgtgccccccaggtccaggcgacgagcggccgccgcagcagccgcggccattagtgctatgactcagggtcgcaggggcaacgtgtattgggtgcgcgactcggttagcggcctgcgcgtgcccgtgcgcacccgccccccgcgcaactagattgcaagaaaaaactacttagactcgtactgttgtatgtatccagcggcggcggcgcgcaacgaagctatgtccaagcgcaaaatcaaagaagagatgctccaggtcatcgcgccggagatctatggccccccgaagaaggaagagcaggattacaagccccgaaagctaaagcgggtcaaaaagaaaaagaaagatgatgatgatgaacttgacgacgaggtggaactgctgcacgctaccgcgcccaggcgacgggtacagtggaaaggtcgacgcgtaaaacgtgttttgcgacccggcaccaccgtagtctttacgcccggtgagcgctccacccgcacctacaagcgcgtgtatgatgaggtgtacggcgacgaggacctgcttgagcaggccaacgagcgcctcggggagtttgcctacggaaagcggcataaggacatgctggcgttgccgctggacgagggcaacccaacacctagcctaaagcccgtaacactgcagcaggtgctgcccgcgcttgcaccgtccgaagaaaagcgcggcctaaagcgcgagtctggtgacttggcacccaccgtgcagctgatggtacccaagcgccagcgactggaagatgtcttggaaaaaatgaccgtggaacctgggctggagcccgaggtccgcgtgcggccaatcaagcaggtggcgccgggactgggcgtgcagaccgtggacgttcagatacccactaccagtagcaccagtattgccaccgccacagagggcatggagacacaaacgtccccggttgcctcagcggtggcggatgccgcggtgcaggcggtcgctgcggccgcgtccaagacctctacggaggtgcaaacggacccgtggatgtttcgcgtttcagccccccggcgcccgcgccgttcgaggaagtacggcgccgccagcgcgctactgcccgaatatgccctacatccttccattgcgcctacccccggctatcgtggctacacctaccgccccagaagacgagcaactacccgacgccgaaccaccactggaacccgccgccgccgtcgccgtcgccagcccgtgctggccccgatttccgtgcgcagggtggctcgcgaaggaggcaggaccctggtgctgccaacagcgcgctaccaccccagcatcgtttaaaagccggtctttgtggttcttgcagatatggccctcacctgccgcctccgtttcccggtgccgggattccgaggaagaatgcaccgtaggaggggcatggccggccacggcctgacgggcggcatgcgtcgtgcgcaccaccggcggcggcgcgcgtcgcaccgtcgcatgcgcggcggtatcctgcccctccttattccactgatcgccgcggcgattggcgccgtgcccggaattgcatccgtggccttgcaggcgcagagacactgattaaaaacaagttgcatgtggaaaaatcaaaataaaaagtctggactctcacgctcgcttggtcctgtaactattttgtagaatggaagacatcaactttgcgtctctggccccgcgacacggctcgcgcccgttcatgggaaactggcaagatatcggcaccagcaatatgagcggtggcgccttcagctggggctcgctgtggagcggcattaaaaatttcggttccaccgttaagaactatggcagcaaggcctggaacagcagcacaggccagatgctgagggataagttgaaagagcaaaatttccaacaaaaggtggtagatggcctggcctctggcattagcggggtggtggacctggccaaccaggcagtgcaaaataagattaacagtaagcttgatccccgccctcccgtagaggagcctccaccggccgtggagacagtgtctccagaggggcgtggcgaaaagcgtccgcgccccgacagggaagaaactctggtgacgcaaatagacgagcctccctcgtacgaggaggcactaaagcaaggcctgcccaccacccgtcccatcgcgcccatggctaccggagtgctgggccagcacacacccgtaacgctggacctgcctccccccgccgacacccagcagaaacctgtgctgccaggcccgaccgccgttgttgtaacccgtcctagccgcgcgtccctgcgccgcgccgccagcggtccgcgatcgttgcggcccgtagccagtggcaactggcaaagcacactgaacagcatcgtgggtctgggggtgcaatccctgaagcgccgacgatgcttctgatagctaacgtgtcgtatgtgtgtcatgtatgcgtccatgtcgccgccagaggagctgctgagccgccgcgcgcccgctttccaagatggctaccccttcgatgatgccgcagtggtcttacatgcacatctcgggccaggacgcctcggagtacctgagccccgggctggtgcagtttgcccgcgccaccgagacgtacttcagcctgaataacaagtttagaaaccccacggtggcgcctacgcacgacgtgaccacagaccggtcccagcgtttgacgctgcggttcatccctgtggaccgtgaggatactgcgtactcgtacaaggcgcggttcaccctagctgtgggtgataaccgtgtgctggacatggcttccacgtactttgacatccgcggcgtgctggacaggggccctacttttaagccctactctggcactgcctacaacgccctggctcccaagggtgccccaaatccttgcgaatgggatgaagctgctactgctcttgaaataaacctagaagaagaggacgatgacaacgaagacgaagtagacgagcaagctgagcagcaaaaaactcacgtatttgggcaggcgccttattctggtataaatattacaaaggagggtattcaaataggtgtcgaaggtcaaacacctaaatatgccgataaaacatttcaacctgaacctcaaataggagaatctcagtggtacgaaacagaaattaatcatgcagctgggagagtcctaaaaaagactaccccaatgaaaccatgttacggttcatatgcaaaacccacaaatgaaaatggagggcaaggcattcttgtaaagcaacaaaatggaaagctagaaagtcaagtggaaatgcaatttttctcaactactgaggcagccgcaggcaatggtgataacttgactcctaaagtggtattgtacagtgaagatgtagatatagaaaccccagacactcatatttcttacatgcccactattaaggaaggtaactcacgagaactaatgggccaacaatctatgcccaacaggcctaattacattgcttttagggacaattttattggtctaatgtattacaacagcacgggtaatatgggtgttctggcgggccaagcatcgcagttgaatgctgttgtagatttgcaagacagaaacacagagctttcataccagcttttgcttgattccattggtgatagaaccaggtacttttctatgtggaatcaggctgttgacagctatgatccagatgttagaattattgaaaatcatggaactgaagatgaacttccaaattactgctttccactgggaggtgtgattaatacagagactcttaccaaggtaaaacctaaaacaggtcaggaaaatggatgggaaaaagatgctacagaattttcagataaaaatgaaataagagttggaaataattttgccatggaaatcaatctaaatgccaacctgtggagaaatttcctgtactccaacatagcgctgtatttgcccgacaagctaaagtacagtccttccaacgtaaaaatttctgataacccaaacacctacgactacatgaacaagcgagtggtggctcccgggctagtggactgctacattaaccttggagcacgctggtcccttgactatatggacaacgtcaacccatttaaccaccaccgcaatgctggcctgcgctaccgctcaatgttgctgggcaatggtcgctatgtgcccttccacatccaggtgcctcagaagttctttgccattaaaaacctccttctcctgccgggctcatacacctacgagtggaacttcaggaaggatgttaacatggttctgcagagctccctaggaaatgacctaagggttgacggagccagcattaagtttgatagcatttgcctttacgccaccttcttccccatggcccacaacaccgcctccacgcttgaggccatgcttagaaacgacaccaacgaccagtcctttaacgactatctctccgccgccaacatgctctaccctatacccgccaacgctaccaacgtgcccatatccatcccctcccgcaactgggcggctttccgcggctgggccttcacgcgccttaagactaaggaaaccccatcactgggctcgggctacgacccttattacacctactctggctctataccctacctagatggaaccttttacctcaaccacacctttaagaaggtggccattacctttgactcttctgtcagctggcctggcaatgaccgcctgcttacccccaacgagtttgaaattaagcgctcagttgacggggagggttacaacgttgcccagtgtaacatgaccaaagactggttcctggtacaaatgctagctaactataacattggctaccagggcttctatatcccagagagctacaaggaccgcatgtactccttctttagaaacttccagcccatgagccgtcaggtggtggatgatactaaatacaaggactaccaacaggtgggcatcctacaccaacacaacaactctggatttgttggctaccttgcccccaccatgcgcgaaggacaggcctaccctgctaacttcccctatccgcttataggcaagaccgcagttgacagcattacccagaaaaagtttctttgcgatcgcaccctttggcgcatcccattctccagtaactttatgtccatgggcgcactcacagacctgggccaaaaccttctctacgccaactccgcccacgcgctagacatgacttttgaggtggatcccatggacgagcccacccttctttatgttttgtttgaagtctttgacgtggtccgtgtgcaccagccgcaccgcggcgtcatcgaaaccgtgtacctgcgcacgcccttctcggccggcaacgccacaacataaagaagcaagcaacatcaacaacagctgccgccatgggctccagtgagcaggaactgaaagccattgtcaaagatcttggttgtgggccatattttttgggcacctatgacaagcgctttccaggctttgtttctccacacaagctcgcctgcgccatagtcaatacggccggtcgcgagactgggggcgtacactggatggcctttgcctggaacccgcactcaaaaacatgctacctctttgagccctttggcttttctgaccagcgactcaagcaggtttaccagtttgagtacgagtcactcctgcgccgtagcgccattgcttcttcccccgaccgctgtataacgctggaaaagtccacccaaagcgtacaggggcccaactcggccgcctgtggactattctgctgcatgtttctccacgcctttgccaactggccccaaactcccatggatcacaaccccaccatgaaccttattaccggggtacccaactccatgctcaacagtccccaggtacagcccaccctgcgtcgcaaccaggaacagctctacagcttcctggagcgccactcgccctacttccgcagccacagtgcgcagattaggagcgccacttctttttgtcacttgaaaaacatgtaaaaataatgtactagagacactttcaataaaggcaaatgcttttatttgtacactctcgggtgattatttacccccacccttgccgtctgcgccgtttaaaaatcaaaggggttctgccgcgcatcgctatgcgccactggcagggacacgttgcgatactggtgtttagtgctccacttaaactcaggcacaaccatccgcggcagctcggtgaagttttcactccacaggctgcgcaccatcaccaacgcgtttagcaggtcgggcgccgatatcttgaagtcgcagttggggcctccgccctgcgcgcgcgagttgcgatacacagggttgcagcactggaacactatcagcgccgggtggtgcacgctggccagcacgctcttgtcggagatcagatccgcgtccaggtcctccgcgttgctcagggcgaacggagtcaactttggtagctgccttcccaaaaagggcgcgtgcccaggctttgagttgcactcgcaccgtagtggcatcaaaaggtgaccgtgcccggtctgggcgttaggatacagcgcctgcataaaagccttgatctgcttaaaagccacctgagcctttgcgccttcagagaagaacatgccgcaagacttgccggaaaactgattggccggacaggccgcgtcgtgcacgcagcaccttgcgtcggtgttggagatctgcaccacatttcggccccaccggttcttcacgatcttggccttgctagactgctccttcagcgcgcgctgcccgttttcgctcgtcacatccatttcaatcacgtgctccttatttatcataatgcttccgtgtagacacttaagctcgccttcgatctcagcgcagcggtgcagccacaacgcgcagcccgtgggctcgtgatgcttgtaggtcacctctgcaaacgactgcaggtacgcctgcaggaatcgccccatcatcgtcacaaaggtcttgttgctggtgaaggtcagctgcaacccgcggtgctcctcgttcagccaggtcttgcatacggccgccagagcttccacttggtcaggcagtagtttgaagttcgcctttagatcgttatccacgtggtacttgtccatcagcgcgcgcgcagcctccatgcccttctcccacgcagacacgatcggcacactcagcgggttcatcaccgtaatttcactttccgcttcgctgggctcttcctcttcctcttgcgtccgcataccacgcgccactgggtcgtcttcattcagccgccgcactgtgcgcttacctcctttgccatgcttgattagcaccggtgggttgctgaaacccaccatttgtagcgccacatcttctctttcttcctcgctgtccacgattacctctggtgatggcgggcgctcgggcttgggagaagggcgcttctttttcttcttgggcgcaatggccaaatccgccgccgaggtcgatggccgcgggctgggtgtgcgcggcaccagcgcgtcttgtgatgagtcttcctcgtcctcggactcgatacgccgcctcatccgcttttttgggggcgcccggggaggcggcggcgacggggacggggacgacacgtcctccatggttgggggacgtcgcgccgcaccgcgtccgcgctcgggggtggtttcgcgctgctcctcttcccgactggccatttccttctcctataggcagaaaaagatcatggagtcagtcgagaagaaggacagcctaaccgccccctctgagttcgccaccaccgcctccaccgatgccgccaacgcgcctaccaccttccccgtcgaggcacccccgcttgaggaggaggaagtgattatcgagcaggacccaggttttgtaagcgaagacgacgaggaccgctcagtaccaacagaggataaaaagcaagaccaggacaacgcagaggcaaacgaggaacaagtcgggcggggggacgaaaggcatggcgactacctagatgtgggagacgacgtgctgttgaagcatctgcagcgccagtgcgccattatctgcgacgcgttgcaagagcgcagcgatgtgcccctcgccatagcggatgtcagccttgcctacgaacgccacctattctcaccgcgcgtaccccccaaacgccaagaaaacggcacatgcgagcccaacccgcgcctcaacttctaccccgtatttgccgtgccagaggtgcttgccacctatcacatctttttccaaaactgcaagatacccctatcctgccgtgccaaccgcagccgagcggacaagcagctggccttgcggcagggcgctgtcatacctgatatcgcctcgctcaacgaagtgccaaaaatctttgagggtcttggacgcgacgagaagcgcgcggcaaacgctctgcaacaggaaaacagcgaaaatgaaagtcactctggagtgttggtggaactcgagggtgacaacgcgcgcctagccgtactaaaacgcagcatcgaggtcacccactttgcctacccggcacttaacctaccccccaaggtcatgagcacagtcatgagtgagctgatcgtgcgccgtgcgcagcccctggagagggatgcaaatttgcaagaacaaacagaggagggcctacccgcagttggcgacgagcagctagcgcgctggcttcaaacgcgcgagcctgccgacttggaggagcgacgcaaactaatgatggccgcagtgctcgttaccgtggagcttgagtgcatgcagcggttctttgctgacccggagatgcagcgcaagctagaggaaacattgcactacacctttcgacagggctacgtacgccaggcctgcaagatctccaacgtggagctctgcaacctggtctcctaccttggaattttgcacgaaaaccgccttgggcaaaacgtgcttcattccacgctcaagggcgaggcgcgccgcgactacgtccgcgactgcgtttacttatttctatgctacacctggcagacggccatgggcgtttggcagcagtgcttggaggagtgcaacctcaaggagctgcagaaactgctaaagcaaaacttgaaggacctatggacggccttcaacgagcgctccgtggccgcgcacctggcggacatcattttccccgaacgcctgcttaaaaccctgcaacagggtctgccagacttcaccagtcaaagcatgttgcagaactttaggaactttatcctagagcgctcaggaatcttgcccgccacctgctgtgcacttcctagcgactttgtgcccattaagtaccgcgaatgccctccgccgctttggggccactgctaccttctgcagctagccaactaccttgcctaccactctgacataatggaagacgtgagcggtgacggtctactggagtgtcactgtcgctgcaacctatgcaccccgcaccgctccctggtttgcaattcgcagctgcttaacgaaagtcaaattatcggtacctttgagctgcagggtccctcgcctgacgaaaagtccgcggctccggggttgaaactcactccggggctgtggacgtcggcttaccttcgcaaatttgtacctgaggactaccacgcccacgagattaggttctacgaagaccaatcccgcccgcctaatgcggagcttaccgcctgcgtcattacccagggccacattcttggccaattgcaagccatcaacaaagcccgccaagagtttctgctacgaaagggacggggggtttacttggacccccagtccggcgaggagctcaacccaatccccccgccgccgcagccctatcagcagcagccgcgggcccttgcttcccaggatggcacccaaaaagaagctgcagctgccgccgccacccacggacgaggaggaatactgggacagtcaggcagaggaggttttggacgaggaggaggaggacatgatggaagactgggagagcctagacgaggaagcttccgaggtcgaagaggtgtcagacgaaacaccgtcaccctcggtcgcattcccctcgccggcgccccagaaatcggcaaccggttccagcatggctacaacctccgctcctcaggcgccgccggcactgcccgttcgccgacccaaccgtagatgggacaccactggaaccagggccggtaagtccaagcagccgccgccgttagcccaagagcaacaacagcgccaaggctaccgctcatggcgcgggcacaagaacgccatagttgcttgcttgcaagactgtgggggcaacatctccttcgcccgccgctttcttctctaccatcacggcgtggccttcccccgtaacatcctgcattactaccgtcatctctacagcccatactgcaccggcggcagcggcagcaacagcagcggccacacagaagcaaaggcgaccggatagcaagactctgacaaagcccaagaaatccacagcggcggcagcagcaggaggaggagcgctgcgtctggcgcccaacgaacccgtatcgacccgcgagcttagaaacaggatttttcccactctgtatgctatatttcaacagagcaggggccaagaacaagagctgaaaataaaaaacaggtctctgcgatccctcacccgcagctgcctgtatcacaaaagcgaagatcagcttcggcgcacgctggaagacgcggaggctctcttcagtaaatactgcgcgctgactcttaaggactagtttcgcgccctttctcaaatttaagcgcgaaaactacgtcatctccagcggccacacccggcgccagcacctgttgtcagcgccattatgagcaaggaaattcccacgccctacatgtggagttaccagccacaaatgggacttgcggctggagctgcccaagactactcaacccgaataaactacatgagcgcgggaccccacatgatatcccgggtcaacggaatacgcgcccaccgaaaccgaattctcctggaacaggcggctattaccaccacacctcgtaataaccttaatccccgtagttggcccgctgccctggtgtaccaggaaagtcccgctcccaccactgtggtacttcccagagacgcccaggccgaagttcagatgactaactcaggggcgcagcttgcgggcggctttcgtcacagggtgcggtcgcccgggcagggtataactcacctgacaatcagagggcgaggtattcagctcaacgacgagtcggtgagctcctcgcttggtctccgtccggacgggacatttcagatcggcggcgccggccgctcttcattcacgcctcgtcaggcaatcctaactctgcagacctcgtcctctgagccgcgctctggaggcattggaactctgcaatttattgaggagtttgtgccatcggtctactttaaccccttctcgggacctcccggccactatccggatcaatttattcctaactttgacgcggtaaaggactcggcggacggctacgactgaatgttaagtggagaggcagagcaactgcgcctgaaacacctggtccactgtcgccgccacaagtgctttgcccgcgactccggtgagttttgctactttgaattgcccgaggatcatatcgagggcccggcgcacggcgtccggcttaccgcccagggagagcttgcccgtagcctgattcgggagtttacccagcgccccctgctagttgagcgggacaggggaccctgtgttctcactgtgatttgcaactgtcctaaccctggattacatcaagatcctctagttaatgtcaggtcgcctaagtcgattaactagagtacccggggatcttattccctttaactaataaaaaaaaataataaagcatcacttacttaaaatcagttagcaaatttctgtccagtttattcagcagcacctccttgccctcctcccagctctggtattgcagcttcctcctggctgcaaactttctccacaatctaaatggaatgtcagtttcctcctgttcctgtccatccgcacccactatcttcatgttgttgcagatgaagcgcgcaagaccgtctgaagataccttcaaccccgtgtatccatatgacacggaaaccggtcctccaactgtgccttttcttactcctccctttgtatcccccaatgggtttcaagagagtccccctggggtactctctttgcgcctatccgaacctctagttacctccaatggcatgcttgcgctcaaaatgggcaacggcctctctctggacgaggccggcaaccttacctcccaaaatgtaaccactgtgagcccacctctcaaaaaaaccaagtcaaacataaacctggaaatatctgcacccctcacagttacctcagaagccctaactgtggctgccgccgcacctctaatggtcgcgggcaacacactcaccatgcaatcacaggccccgctaaccgtgcacgactccaaacttagcattgccacccaaggacccctcacagtgtcagaaggaaagctagccctgcaaacatcaggccccctcaccaccaccgatagcagtacccttactatcactgcctcaccccctctaactactgccactggtagcttgggcattgacttgaaagagcccatttatacacaaaatggaaaactaggactaaagtacggggctcctttgcatgtaacagacgacctaaacactttgaccgtagcaactggtccaggtgtgactattaataatacttccttgcaaactaaagttactggagccttgggttttgattcacaaggcaatatgcaacttaatgtagcaggaggactaaggattgattctcaaaacagacgccttatacttgatgttagttatccgtttgatgctcaaaaccaactaaatctaagactaggacagggccctctttttataaactcagcccacaacttggatattaactacaacaaaggcctttacttgtttacagcttcaaacaattccaaaaagcttgaggttaacctaagcactgccaaggggttgatgtttgacgctacagccatagccattaatgcaggagatgggcttgaatttggttcacctaatgcaccaaacacaaatcccctcaaaacaaaaattggccatggcctagaatttgattcaaacaaggctatggttcctaaactaggaactggccttagttttgacagcacaggtgccattacagtaggaaacaaaaataatgataagctaactttgtggaccggaataaaccctccacctaactgtcaaattgtggaaaacactaatacaaatgatggcaaacttactttagtattagtaaaaaatggagggcttgttaatggctacgtgtctctagttggtgtatcagacactgtgaaccaaatgttcacacaaaagacagcaaacatccaattaagattatattttgactcttctggaaatctattaactgaggaatcagacttaaaaattccacttaaaaataaatcttctacagcgaccagtgaaactgtagccagcagcaaagcctttatgccaagtactacagcttatcccttcaacaccactactagggatagtgaaaactacattcatggaatatgttactacatgactagttatgatagaagtctatttcccttgaacatttctataatgctaaacagccgtatgatttcttccaatgttgcctatgccatacaatttgaatggaatctaaatgcaagtgaatctccagaaagcaacatagctacgctgaccacatccccctttttcttttcttacattacagaagacgacaactaaagaatcgtttgtgttatgtttcaacgtgtttatttttcaattgcagaaaatttcaagtcatttttcattcagtagtatagccccaccaccacatagcttatacagatcaccgtaccttaatcaaactcacagaaccctagtattcaacctgccacctccctcccaacacacagagtacacagtcctttctccccggctggccttaaaaagcatcatatcatgggtaacagacatattcttaggtgttatattccacacggtttcctgtcgagccaaacgctcatcagtgatattaataaactccccgggcagctcacttaagttcatgtcgctgtccagctgctgagccacaggctgctgtccaacttgcggttgcttaacgggcggcgaaggagaagtccacgcctacatgggggtagagtcataatcgtgcatcaggatagggcggtggtgctgcagcagcgcgcgaataaactgctgccgccgccgctccgtcctgcaggaatacaacatggcagtggtctcctcagcgatgattcgcaccgcccgcagcataaggcgccttgtcctccgggcacagcagcgcaccctgatctcacttaaatcagcacagtaactgcagcacagcaccacaatattgttcaaaatcccacagtgcaaggcgctgtatccaaagctcatggcggggaccacagaacccacgtggccatcataccacaagcgcaggtagattaagtggcgacccctcataaacacgctggacataaacattacctcttttggcatgttgtaattcaccacctcccctctgattaaacatggcgccatccaccaccatcctaaaccagctggccaaaacctgcccgccggctatacactgcagggaaccgggactggaacaatgacagtggagagcccaggactcgtaaccatggatcatcatgctcgtcatgatatcaatgttggcacaacacaggcacacgtgcatacacttcctcaggattacaagctcctcccgcgttagaaccatatcccagggaacaacccattcctgaatcagcgtaaatcccacactgcagggaagacctcgcacgtaactcacgttgtgcattgtcaaagtgttacattcgggcagcagcggatgatcctccagtatggtagcgcgggtttctgtctcaaaaggaggtagacgatccctactgtacggagtgcgccgagacaaccgagatcgtgttggtcgtagtgtcatgccaaatggaacgccggacgtagtcatatttcctgaagcaaaaccaggtgcgggcgtgacaaacagatctgcgtctccggtctcgccgcttagatcgctctgtgtagtagttgtagtatatccactctctcaaagcatccaggcgccccctggcttcgggttctatgtaaactccttcatgcgccgctgccctgataacatccaccaccgcagaataagccacacccagccaacctacacattcgttctgcgagtcacacacgggaggagcgggaagagctggaagaaccatgtttttttttttattccaaaagattatccaaaacctcaaaatgaagatctattaagtgaacgcgctcccctccggtggcgtggtcaaactctacagccaaagaacagataatggcatttgtaagatgttgcacaatggcttccaaaaggcaaacggccctcacgtccaagtggacgtaaaggctaaacccttcagggtgaatctcctctataaacattccagcaccttcaaccatgcccaaataattctcatctcgccaccttctcaatatatctctaagcaaatcccgaatattaagtccggccattgtaaaaatctgctccagagcgccctccaccttcagcctcaagcagcgaatcatgattgcaaaaattcaggttcctcacagacctgtataagattcaaaagcggaacattaacaaaaataccgcgatcccgtaggtcccttcgcagggccagctgaacataatcgtgcaggtctgcacggaccagcgcggccacttccccgccaggaaccatgacaaaagaacccacactgattatgacacgcatactcggagctatgctaaccagcgtagccccgatgtaagcttgttgcatgggcggcgatataaaatgcaaggtgctgctcaaaaaatcaggcaaagcctcgcgcaaaaaagaaagcacatcgtagtcatgctcatgcagataaaggcaggtaagctccggaaccaccacagaaaaagacaccatttttctctcaaacatgtctgcgggtttctgcataaacacaaaataaaataacaaaaaaacatttaaacattagaagcctgtcttacaacaggaaaaacaacccttataagcataagacggactacggccatgccggcgtgaccgtaaaaaaactggtcaccgtgattaaaaagcaccaccgacagctcctcggtcatgtccggagtcataatgtaagactcggtaaacacatcaggttgattcacatcggtcagtgctaaaaagcgaccgaaatagcccgggggaatacatacccgcaggcgtagagacaacattacagcccccataggaggtataacaaaattaataggagagaaaaacacataaacacctgaaaaaccctcctgcctaggcaaaatagcaccctcccgctccagaacaacatacagcgcttccacagcggcagccataacagtcagccttaccagtaaaaaagaaaacctattaaaaaaacaccactcgacacggcaccagctcaatcagtcacagtgtaaaaaagggccaagtgcagagcgagtatatataggactaaaaaatgacgtaacggttaaagtccacaaaaaacacccagaaaaccgcacgcgaacctacgcccagaaacgaaagccaaaaaacccacaacttcctcaaatcgtcacttccgttttcccacgttacgtcacttcccattttaagaaaactacaattcccaacacatacaagttactccgccctaaaacctacgtcacccgccccgttcccacgccccgcgccacgtcacaaactccaccccctcattatcatattggcttcaatccaaaataaggtatattattgatgatg

SEQ ID NO: 15 - DNA, 37105 bp, Artificial Sequence
  Adk35FR-E4orf6/Spike-E4dl355(E4re#10)
ttaattaacatcatcaataatataccttattttggattgaagccaatatgataatgagggggtggagtttgtgacgtggcgcggggcgtgggaacggggcgggtgacgtagtagtgtggcggaagtgtgatgttgcaagtgtggcggaacacatgtaagcgacggatgtggcaaaagtgacgtttttggtgtgcgccggtgtacacaggaagtgacaattttcgcgcggttttaggcggatgttgtagtaaatttgggcgtaaccgagtaagatttggccattttcgcgggaaaactgaataagaggaagtgaaatctgaataattttgtgttactcatagcgcgtaataatttgctccggtgcccgtcagtgggcagagcgcacatcgcccacagtccccgagaagttggggggaggggtcggcaattgaaccggtgcctagagaaggtggcgcggggtaaactgggaaagtgatgtcgtgtactggctccgcctttttcccgagggtgggggagaaccgtatataagtgcagtagtcgccgtgaacgttctttttcgcaacgggtttgccgccagaacacaggtaagtgccgtgtgtggttcccgcgggcctggcctctttacgggttatggcccttgcgtgccttgaattacttccacgcccctggctgcagtacgtgattcttgatcccgagcttcgggttggaagtgggtgggagagttcgaggccttgcgcttaaggagccccttcgcctcgtgcttgagttgaggcttggcctgggcgctggggccgccgcgtgcgaatctggtggcaccttcgcgcctgtctcgctgctttcgataagtctctagccatttaaaatttttgatgacctgctgcgacgctttttttctggcaagatagtcttgtaaatgcgggccaagatctgcacactggtatttcggtttttggggccgcgggcggcgacggggcccgtgcgtcccagcgcacatgttcggcgaggcggggcctgcgagcgcggccaccgagaatcggacgggggtagtctcaagctggccggcctgctctggtgcctggcctcgcgccgccgtgtatcgccccgccctgggcggcaaggctggcccggtcggcaccagttgcgtgagcggaaagatggccgcttcccggccctgctgcagggagctcaaaatggaggacgcggcgctcgggagagcgggcgggtgagtcacccacacaaaggaaaagggcctttccgtcctcagccgtcgcttcatgtgactccacggagtaccgggcgccgtccaggcacctcgattagttctcgagcttttggagtacgtcgtctttaggttggggggaggggttttatgcgatggagtttccccatactgagtgggtggagactgaagttaggccagcttggcacttgatgtaattctccttggaatttgccctttttgagtttggatcttggttcattctcaagcctcagacagtggttcaaagtttttttcttccatttaaggtgtcgtgaaaactaccccaagctggccaccatgactacgtccggcgttccatttggcatgacactacgaccaacacgatctcggttgtctcggcgcactccgtacagtagggatcgtctacctccttttgagacagaaacccgcgctaccatactggaggatcatccgctgctgcccgaatgtaacactttgacaatgcacaacgtgagttacgtgcgaggtcttccctgcagtgtgggatttacgctgattcaggaatgggttgttccctgggatatggttctaacgcgggaggagcttgtaatcctgaggaagtgtatgcacgtgtgcctgtgttgtgccaacattgatatcatgacgagcatgatgatccatggttacgagtcctgggctctccactgtcattgttccagtcccggttccctgcagtgtatagccggcgggcaggttttggccagctggtttaggatggtggtggatggcgccatgtttaatcagaggtttatatggtaccgggaggtggtgaattacaacatgccaaaagaggtaatgtttatgtccagcgtgtttatgaggggtcgccacttaatctacctgcgcttgtggtatgatggccacgtgggttctgtggtccccgccatgagctttggatacagcgccttgcactgtgggattttgaacaatattgtggtgctgtgctgcagttactgtgctgatttaagtgagatcagggtgcgctgctgtgcccggaggacaaggcgccttatgctgcgggcggtgcgaatcatcgctgaggagaccactgccatgttgtattcctgcaggacggagcggcggcggcagcagtttattcgcgcgctgctgcagcaccaccgccctatcctgatgcacgattatgactctacccccatgtagaagcttggggatcaattctctagagctcgctgatcagcctcgactgtgccttctagttgccagccatctgttgtttgcccctcccccgtgccttccttgaccctggaaggtgccactcccactgtcctttcctaataaaatgaggaaattgcatcgcattgtctgagtaggtgtcattctattctggggggtggggtggggcaggacagcaagggggaggattgggaagacaatagcaggcatgctggggatgcggtgggctctatggcttctgagggatccgcgttaagatacattgatgagtttggacaaaccacaactagaatgcagtgaaaaaaatgctttatttgtgaaatttgtgatgctattgctttatttgtaaccattataagctgcaataaacaagttaacaacaacaattgcattcattttatgtttcaggttcagggggaggtgtgggaggttttttaaagcaagtaaaacctctacaaatgtggtatggctgattatgatcaattttcatggccacttgatgtattgttcatatttgcccagttcttggaggtcaatcagggactcattcaggttcttagccacctcattcagtctgtcaatctccttctggatgttcaccacagaggcattgatgccagagatgtctcccaggtccacatcagggctggtgtggttcttgaagtatttgtccagttcctccttgaaggagtccagttcaggttggagtgggtcatagactgtgttgttcacaatgccaatcaccacatcacagttgccagacacaaaggtgttgtctgtggtgataatctgtggttcatagaagttcctctgggtcacaaaccagtgggtgccattgctcacaaacactccctcccttggaaagtgagccttgccatcatggcagatggcaggggctgtggtgaagttcttctcctgggcaggcacataggtcacatgcaggaacaccactccatgaggggcagactgtggaaaactcatcaggtggtagcccttgccacagaagtccaccctcttgctttgtcccagcacacactcactcatcttggtggcagccaggttggcagatgccctaatctcagcagccctgataagttgttgggtcacataggtttggagggattggagtctgcctgtaatcagtctgtcaatctggacctcagcctccaccttgtccagtctgctcaggatgtcattcagcacagaggagatggctccaaagttgctggaaagttgcttcaccagggtgttcagagcctgggcattctggttcaccacatcttggagtttgcccagggcagaggctgtgctggacagggagtcctgaatcttgccaatggcagagttgaactggttggcaatcagtttctggttctcatagagcacattctgggtcactccaatgccattgaacctgtaagccatctgcatagcaaatgggatttggagggctgctcctgctccaaaggtccagccagaggtgatggtgccagccagcagggcagaggtgtattgggcaatcatctcatctgtcagcagtggaggcagcactgtcagtccattgaacttctgggcacaaatcaggtccctggcagcaatgtctcccagacagtctccatattgcttgatgaagccagcatcagccagggtcaccttgttgaacagcaggtcctcaatgaaggacctcttgcttggcttgcttgggtcaggcagaatctggctgaagttgaagcctccaaagtccttgattggaggtgtcttgtaaatctgcttcacctgggcaaacacctcctgggtgttcttgtcctgttccacagcaatgcctgtcagagccctgttaagttgggtacagaaggagccatattggagcagcaggttgctacactctgtgctgtctccacagatatacattgtacagtccacagaggtcttggtcatactcacaggcagaatctctgtggtcacagagatggtgaagttggttgggatggcaatgctgttgttgctgtaagccacagagttctctgctcccagactcattgtgtaggcaatgatgctctggcttgccacagacctcgacccaccgccaccggtctgggtctggtaggaggcacagatgcctgctccaattgggatgtcacactcataggagttgttcacatgctctgctccaatcagacagccagccctggtctggaacacattgctgcctgtgctgtagaccctccaggttggtgtaagttggtcagcatggatagccacaggcacctcagtacagttcacatcctggtagagcacagccacctggttgctggtgttggtgccaggtgtaatcacagacactcctccaaaggaacatggtgtgatgtccagaatctccaaggtctgtgggtccctcacagcatctgtggtgtcagcaatgtccctgccaaactgttggaatggcaggaacttcttgttgctctctgtcagcactcctgtgcctgtcagtccattgaagttgaagttcacacacttgttcttcaccaggttggtgctcttctttggtccacacactgtggcaggggcatggagcagttcaaaggacagcaccaccaccctgtatggttggtagcccactccattggttggttggaagccataggattggagtggaaagtaacagttgaagccctccactccattacatggtgtgctgccagcctggtaaatctctgtgctgatgtccctctcaaatggtttcaggttgctcttcctgaacagtctgtagaggtagttgtagttgcctcccaccttgctgtccaggttgttgctgttccaggcaatcacacagcctgtgaagtcatcaggcagtttgtagttgtagtcagcaatcttgcctgtttgtccaggggcaatctgtctcacctcatctcccctaatcacaaaggagtcagcatagacattggtgaaacacaggtcattcagtttggttgggctcactccataacacttgaaggtgctgaaggaggcagagttgtagagcacagagtagtcagccacacagttgctaatcctcttcctgttccaggcatagacagaggcaaacctggtggcattgaacacctctccaaatggacacaggttggtgatgtttggaaacctcacaatgctctctgttggttggaccctgaagttgctggtctggtagatgcccttctccactgtgaaggatttcagggtacacttggtctcagacagtgggtccagggcacagtccacagcatctgtgatggtgccattctcattgtatttcagcaggaaggtccttggttggaggtagcccacatagtaggctgctgctcctgctgtccagccagaggaggagtctccaggtgtcaggtaggacctgtgcagagccagcagggtctggaacctggtgatgttgatgccaattggcaggtccaccagtggttccaaggcagagaagccctgtggcaggtccctcaccaggttgattggtgtgtgtttgctgtaaatcttgaagtagccatcaatgttcttgaacacaaactccctcaggttcttgaagttgccctgcttgccctccaagtccatcaggaatggttggctcacatattcaaaggtacagttgttggcagaggagtagaccctgaactcagactccatccaggacttgttgttcttgtggtagtagactcccaggaatgggtcattacagaactggaactcacacaccttaatcaccacattggtggcattgttcacaatcagcagggactgggtcttgctgtccagggtggtgccaaaaatccagcccctgatgatgttgctcttctctgtgctggcaaagtagactccatcattgaatggcagcacagggttgtcaaacctcttggtgccattggtgccagacacatggatggcatggaaccaggtcacattgctgaagaatggcaggaacaggtcctgggtgctgtgcagcacagaggacctgaacaccttgtcagggtagtagactcccctggtgaaggagttggtgtaggcaggaggaagttgggtcctggtggtcaggttcacacactggctggacaccagtggcagcagcaccaggaacacaaacatggtggcaaatcggaggctggatcggtcccggtgtcttctatggaggtcaaaacagcgtggatggcgtctccaggcgatctgacggttcactaaacgagctcgtcgacgatctctatcactgatagggagatctctatcactgatagggagagctctgcttatatagacctcccaccgtacacgcctaccgcccatttgcgtcaatggggcggagttgttacgacattttggaaagtcccgttgattttggtgccaaaacaaactcccattgacgtcaatggggtggagacttggaaatccccgtgagtcaaaccgctatccacgcccattgatgtactgccaaaaccgcatcaccatggtaatagcgatgactaatacgtagatgtactgccaagtaggaaagtcccataaggtcatgtactgggcataatgccaggcgggccatttaccgtcattgacgtcaatagggggcgtacttggcatatgatacacttgatgtactgccaagtgggcagtttaccgtaaatactccacccattgacgtcaatggaaagtccctattggcgttactatgggaacatacgtcattattgacgtcaatgggcgggggtcgttgggcggtcagccaggcgggccatttaccgtaagttatgtaacgcggaactccatatatgggctatgaactaatgaccccgtaattgattactattacagaaattgggcgtggcttaagggtgggaaagaatatataaggtgggggtcttatgtagttttgtatctgttttgcagcagccgccgccgccatgagcaccaactcgtttgatggaagcattgtgagctcatatttgacaacgcgcatgcccccatgggccggggtgcgtcagaatgtgatgggctccagcattgatggtcgccccgtcctgcccgcaaactctactaccttgacctacgagaccgtgtctggaacgccgttggagactgcagcctccgccgccgcttcagccgctgcagccaccgcccgcgggattgtgactgactttgctttcctgagcccgcttgcaagcagtgcagcttcccgttcatccgcccgcgatgacaagttgacggctcttttggcacaattggattctttgacccgggaacttaatgtcgtttctcagcagctgttggatctgcgccagcaggtttctgccctgaaggcttcctcccctcccaatgcggtttaaaacataaataaaaaaccagactctgtttggatttggatcaagcaagtgtcttgctgtctttatttaggggttttgcgcgcgcggtaggcccgggaccagcggtctcggtcgttgagggtcctgtgtattttttccaggacgtggtaaaggtgactctggatgttcagatacatgggcataagcccgtctctggggtggaggtagcaccactgcagagcttcatgctgcggggtggtgttgtagatgatccagtcgtagcaggagcgctgggcgtggtgcctaaaaatgtctttcagtagcaagctgattgccaggggcaggcccttggtgtaagtgtttacaaagcggttaagctgggatgggtgcatacgtggggatatgagatgcatcttggactgtatttttaggttggctatgttcccagccatatccctccggggattcatgttgtgcagaaccaccagcacagtgtatccggtgcacttgggaaatttgtcatgtagcttagaaggaaatgcgtggaagaacttggagacgcccttgtgacctccaagattttccatgcattcgtccataatgatggcaatgggcccacgggcggcggcctgggcgaagatatttctgggatcactaacgtcatagttgtgttccaggatgagatcgtcataggccatttttacaaagcgcgggcggagggtgccagactgcggtataatggttccatccggcccaggggcgtagttaccctcacagatttgcatttcccacgctttgagttcagatggggggatcatgtctacctgcggggcgatgaagaaaacggtttccggggtaggggagatcagctgggaagaaagcaggttcctgagcagctgcgacttaccgcagccggtgggcccgtaaatcacacctattaccgggtgcaactggtagttaagagagctgcagctgccgtcatccctgagcaggggggccacttcgttaagcatgtccctgactcgcatgttttccctgaccaaatccgccagaaggcgctcgccgcccagcgatagcagttcttgcaaggaagcaaagtttttcaacggtttgagaccgtccgccgtaggcatgcttttgagcgtttgaccaagcagttccaggcggtcccacagctcggtcacctgctctacggcatctcgatccagcatatctcctcgtttcgcgggttggggcggctttcgctgtacggcagtagtcggtgctcgtccagacgggccagggtcatgtctttccacgggcgcagggtcctcgtcagcgtagtctgggtcacggtgaaggggtgcgctccgggctgcgcgctggccagggtgcgcttgaggctggtcctgctggtgctgaagcgctgccggtcttcgccctgcgcgtcggccaggtagcatttgaccatggtgtcatagtccagcccctccgcggcgtggcccttggcgcgcagcttgcccttggaggaggcgccgcacgaggggcagtgcagacttttgagggcgtagagcttgggcgcgagaaataccgattccggggagtaggcatccgcgccgcaggccccgcagacggtctcgcattccacgagccaggtgagctctggccgttcggggtcaaaaaccaggtttcccccatgctttttgatgcgtttcttacctctggtttccatgagccggtgtccacgctcggtgacgaaaaggctgtccgtgtccccgtatacagacttgagaggcctgtcctcgagcggtgttccgcggtcctcctcgtatagaaactcggaccactctgagacaaaggctcgcgtccaggccagcacgaaggaggctaagtgggaggggtagcggtcgttgtccactagggggtccactcgctccagggtgtgaagacacatgtcgccctcttcggcatcaaggaaggtgattggtttgtaggtgtaggccacgtgaccgggtgttcctgaaggggggctataaaagggggtgggggcgcgttcgtcctcactctcttccgcatcgctgtctgcgagggccagctgttggggtgagtactccctctgaaaagcgggcatgacttctgcgctaagattgtcagtttccaaaaacgaggaggatttgatattcacctggcccgcggtgatgcctttgagggtggccgcatccatctggtcagaaaagacaatctttttgttgtcaagcttggtggcaaacgacccgtagagggcgttggacagcaacttggcgatggagcgcagggtttggtttttgtcgcgatcggcgcgctccttggccgcgatgtttagctgcacgtattcgcgcgcaacgcaccgccattcgggaaagacggtggtgcgctcgtcgggcaccaggtgcacgcgccaaccgcggttgtgcagggtgacaaggtcaacgctggtggctacctctccgcgtaggcgctcgttggtccagcagaggcggccgcccttgcgcgagcagaatggcggtagggggtctagctgcgtctcgtccggggggtctgcgtccacggtaaagaccccgggcagcaggcgcgcgtcgaagtagtctatcttgcatccttgcaagtctagcgcctgctgccatgcgcgggcggcaagcgcgcgctcgtatgggttgagtgggggaccccatggcatggggtgggtgagcgcggaggcgtacatgccgcaaatgtcgtaaacgtagaggggctctctgagtattccaagatatgtagggtagcatcttccaccgcggatgctggcgcgcacgtaatcgtatagttcgtgcgagggagcgaggaggtcgggaccgaggttgctacgggcgggctgctctgctcggaagactatctgcctgaagatggcatgtgagttggatgatatggttggacgctggaagacgttgaagctggcgtctgtgagacctaccgcgtcacgcacgaaggaggcgtaggagtcgcgcagcttgttgaccagctcggcggtgacctgcacgtctagggcgcagtagtccagggtttccttgatgatgtcatacttatcctgtcccttttttttccacagctcgcggttgaggacaaactcttcgcggtctttccagtactcttggatcggaaacccgtcggcctccgaacggtaagagcctagcatgtagaactggttgacggcctggtaggcgcagcatcccttttctacgggtagcgcgtatgcctgcgcggccttccggagcgaggtgtgggtgagcgcaaaggtgtccctgaccatgactttgaggtactggtatttgaagtcagtgtcgtcgcatccgccctgctcccagagcaaaaagtccgtgcgctttttggaacgcggatttggcagggcgaaggtgacatcgttgaagagtatctttcccgcgcgaggcataaagttgcgtgtgatgcggaagggtcccggcacctcggaacggttgttaattacctgggcggcgagcacgatctcgtcaaagccgttgatgttgtggcccacaatgtaaagttccaagaagcgcgggatgcccttgatggaaggcaattttttaagttcctcgtaggtgagctcttcaggggagctgagcccgtgctctgaaagggcccagtctgcaagatgagggttggaagcgacgaatgagctccacaggtcacgggccattagcatttgcaggtggtcgcgaaaggtcctaaactggcgacctatggccattttttctggggtgatgcagtagaaggtaagcgggtcttgttcccagcggtcccatccaaggttcgcggctaggtctcgcgcggcagtcactagaggctcatctccgccgaacttcatgaccagcatgaagggcacgagctgcttcccaaaggcccccatccaagtataggtctctacatcgtaggtgacaaagagacgctcggtgcgaggatgcgagccgatcgggaagaactggatctcccgccaccaattggaggagtggctattgatgtggtgaaagtagaagtccctgcgacgggccgaacactcgtgctggcttttgtaaaaacgtgcgcagtactggcagcggtgcacgggctgtacatcctgcacgaggttgacctgacgaccgcgcacaaggaagcagagtgggaatttgagcccctcgcctggcgggtttggctggtggtcttctacttcggctgcttgtccttgaccgtctggctgctcgaggggagttacggtggatcggaccaccacgccgcgcgagcccaaagtccagatgtccgcgcgcggcggtcggagcttgatgacaacatcgcgcagatgggagctgtccatggtctggagctcccgcggcgtcaggtcaggcgggagctcctgcaggtttacctcgcatagacgggtcagggcgcgggctagatccaggtgatacctaatttccaggggctggttggtggcggcgtcgatggcttgcaagaggccgcatccccgcggcgcgactacggtaccgcgcggcgggcggtgggccgcgggggtgtccttggatgatgcatctaaaagcggtgacgcgggcgagcccccggaggtagggggggctccggacccgccgggagagggggcaggggcacgtcggcgccgcgcgcgggcaggagctggtgctgcgcgcgtaggttgctggcgaacgcgacgacgcggcggttgatctcctgaatctggcgcctctgcgtgaagacgacgggcccggtgagcttgaacctgaaagagagttcgacagaatcaatttcggtgtcgttgacggcggcctggcgcaaaatctcctgcacgtctcctgagttgtcttgataggcgatctcggccatgaactgctcgatctcttcctcctggagatctccgcgtccggctcgctccacggtggcggcgaggtcgttggaaatgcgggccatgagctgcgagaaggcgttgaggcctccctcgttccagacgcggctgtagaccacgcccccttcggcatcgcgggcgcgcatgaccacctgcgcgagattgagctccacgtgccgggcgaagacggcgtagtttcgcaggcgctgaaagaggtagttgagggtggtggcggtgtgttctgccacgaagaagtacataacccagcgtcgcaacgtggattcgttgatatcccccaaggcctcaaggcgctccatggcctcgtagaagtccacggcgaagttgaaaaactgggagttgcgcgccgacacggttaactcctcctccagaagacggatgagctcggcgacagtgtcgcgcacctcgcgctcaaaggctacaggggcctcttcttcttcttcaatctcctcttccataagggcctccccttcttcttcttctggcggcggtgggggaggggggacacggcggcgacgacggcgcaccgggaggcggtcgacaaagcgctcgatcatctccccgcggcgacggcgcatggtctcggtgacggcgcggccgttctcgcgggggcgcagttggaagacgccgcccgtcatgtcccggttatgggttggcggggggctgccatgcggcagggatacggcgctaacgatgcatctcaacaattgttgtgtaggtactccgccgccgagggacctgagcgagtccgcatcgaccggatcggaaaacctctcgagaaaggcgtctaaccagtcacagtcgcaaggtaggctgagcaccgtggcgggcggcagcgggcggcggtcggggttgtttctggcggaggtgctgctgatgatgtaattaaagtaggcggtcttgagacggcggatggtcgacagaagcaccatgtccttgggtccggcctgctgaatgcgcaggcggtcggccatgccccaggcttcgttttgacatcggcgcaggtctttgtagtagtcttgcatgagcctttctaccggcacttcttcttctccttcctcttgtcctgcatctcttgcatctatcgctgcggcggcggcggagtttggccgtaggtggcgccctcttcctcccatgcgtgtgaccccgaagcccctcatcggctgaagcagggctaggtcggcgacaacgcgctcggctaatatggcctgctgcacctgcgtgagggtagactggaagtcatccatgtccacaaagcggtggtatgcgcccgtgttgatggtgtaagtgcagttggccataacggaccagttaacggtctggtgacccggctgcgagagctcggtgtacctgagacgcgagtaagccctcgagtcaaatacgtagtcgttgcaagtccgcaccaggtactggtatcccaccaaaaagtgcggcggcggctggcggtagaggggccagcgtagggtggccggggctccgggggcgagatcttccaacataaggcgatgatatccgtagatgtacctggacatccaggtgatgccggcggcggtggtggaggcgcgcggaaagtcgcggacgcggttccagatgttgcgcagcggcaaaaagtgctccatggtcgggacgctctggccggtcaggcgcgcgcaatcgttgacgctctagcgtgcaaaaggagagcctgtaagcgggcactcttccgtggtctggtggataaattcgcaagggtatcatggcggacgaccggggttcgagccccgtatccggccgtccgccgtgatccatgcggttaccgcccgcgtgtcgaacccaggtgtgcgacgtcagacaacgggggagtgctccttttggcttccttccaggcgcggcggctgctgcgctagcttttttggccactggccgcgcgcagcgtaagcggttaggctggaaagcgaaagcattaagtggctcgctccctgtagccggagggttattttccaagggttgagtcgcgggacccccggttcgagtctcggaccggccggactgcggcgaacgggggtttgcctccccgtcatgcaagaccccgcttgcaaattcctccggaaacagggacgagccccttttttgcttttcccagatgcatccggtgctgcggcagatgcgcccccctcctcagcagcggcaagagcaagagcagcggcagacatgcagggcaccctcccctcctcctaccgcgtcaggaggggcgacatccgcggttgacgcggcagcagatggtgattacgaacccccgcggcgccgggcccggcactacctggacttggaggagggcgagggcctggcgcggctaggagcgccctctcctgagcggcacccaagggtgcagctgaagcgtgatacgcgtgaggcgtacgtgccgcggcagaacctgtttcgcgaccgcgagggagaggagcccgaggagatgcgggatcgaaagttccacgcagggcgcgagctgcggcatggcctgaatcgcgagcggttgctgcgcgaggaggactttgagcccgacgcgcgaaccgggattagtcccgcgcgcgcacacgtggcggccgccgacctggtaaccgcatacgagcagacggtgaaccaggagattaactttcaaaaaagctttaacaaccacgtgcgtacgcttgtggcgcgcgaggaggtggctataggactgatgcatctgtgggactttgtaagcgcgctggagcaaaacccaaatagcaagccgctcatggcgcagctgttccttatagtgcagcacagcagggacaacgaggcattcagggatgcgctgctaaacatagtagagcccgagggccgctggctgctcgatttgataaacatcctgcagagcatagtggtgcaggagcgcagcttgagcctggctgacaaggtggccgccatcaactattccatgcttagcctgggcaagttttacgcccgcaagatataccataccccttacgttcccatagacaaggaggtaaagatcgaggggttctacatgcgcatggcgctgaaggtgcttaccttgagcgacgacctgggcgtttatcgcaacgagcgcatccacaaggccgtgagcgtgagccggcggcgcgagctcagcgaccgcgagctgatgcacagcctgcaaagggccctggctggcacgggcagcggcgatagagaggccgagtcctactttgacgcgggcgctgacctgcgctgggccccaagccgacgcgccctggaggcagctggggccggacctgggctggcggtggcacccgcgcgcgctggcaacgtcggcggcgtggaggaatatgacgaggacgatgagtacgagccagaggacggcgagtactaagcggtgatgtttctgatcagatgatgcaagacgcaacggacccggcggtgcgggcggcgctgcagagccagccgtccggccttaactccacggacgactggcgccaggtcatggaccgcatcatgtcgctgactgcgcgcaatcctgacgcgttccggcagcagccgcaggccaaccggctctccgcaattctggaagcggtggtcccggcgcgcgcaaaccccacgcacgagaaggtgctggcgatcgtaaacgcgctggccgaaaacagggccatccggcccgacgaggccggcctggtctacgacgcgctgcttcagcgcgtggctcgttacaacagcggcaacgtgcagaccaacctggaccggctggtgggggatgtgcgcgaggccgtggcgcagcgtgagcgcgcgcagcagcagggcaacctgggctccatggttgcactaaacgccttcctgagtacacagcccgccaacgtgccgcggggacaggaggactacaccaactttgtgagcgcactgcggctaatggtgactgagacaccgcaaagtgaggtgtaccagtctgggccagactattttttccagaccagtagacaaggcctgcagaccgtaaacctgagccaggctttcaaaaacttgcaggggctgtggggggtgcgggctcccacaggcgaccgcgcgaccgtgtctagcttgctgacgcccaactcgcgcctgttgctgctgctaatagcgcccttcacggacagtggcagcgtgtcccgggacacatacctaggtcacttgctgacactgtaccgcgaggccataggtcaggcgcatgtggacgagcatactttccaggagattacaagtgtcagccgcgcgctggggcaggaggacacgggcagcctggaggcaaccctaaactacctgctgaccaaccggcggcagaagatcccctcgttgcacagtttaaacagcgaggaggagcgcattttgcgctacgtgcagcagagcgtgagccttaacctgatgcgcgacggggtaacgcccagcgtggcgctggacatgaccgcgcgcaacatggaaccgggcatgtatgcctcaaaccggccgtttatcaaccgcctaatggactacttgcatcgcgcggccgccgtgaaccccgagtatttcaccaatgccatcttgaacccgcactggctaccgccccctggtttctacaccgggggattcgaggtgcccgagggtaacgatggattcctctgggacgacatagacgacagcgtgttttccccgcaaccgcagaccctgctagagttgcaacagcgcgagcaggcagaggcggcgctgcgaaaggaaagcttccgcaggccaagcagcttgtccgatctaggcgctgcggccccgcggtcagatgctagtagcccatttccaagcttgatagggtctcttaccagcactcgcaccacccgcccgcgcctgctgggcgaggaggagtacctaaacaactcgctgctgcagccgcagcgcgaaaaaaacctgcctccggcatttcccaacaacgggatagagagcctagtggacaagatgagtagatggaagacgtacgcgcaggagcacagggacgtgccaggcccgcgcccgcccacccgtcgtcaaaggcacgaccgtcagcggggtctggtgtgggaggacgatgactcggcagacgacagcagcgtcctggatttgggagggagtggcaacccgtttgcgcaccttcgccccaggctggggagaatgttttaaaaaaaaaaaagcatgatgcaaaataaaaaactcaccaaggccatggcaccgagcgttggttttcttgtattccccttagtatgcggcgcgcggcgatgtatgaggaaggtcctcctccctcctacgagagtgtggtgagcgcggcgccagtggcggcggcgctgggttctcccttcgatgctcccctggacccgccgtttgtgcctccgcggtacctgcggcctaccggggggagaaacagcatccgttactctgagttggcacccctattcgacaccacccgtgtgtacctggtggacaacaagtcaacggatgtggcatccctgaactaccagaacgaccacagcaactttctgaccacggtcattcaaaacaatgactacagcccgggggaggcaagcacacagaccatcaatcttgacgaccggtcgcactggggcggcgacctgaaaaccatcctgcataccaacatgccaaatgtgaacgagttcatgtttaccaataagtttaaggcgcgggtgatggtgtcgcgcttgcctactaaggacaatcaggtggagctgaaatacgagtgggtggagttcacgctgcccgagggcaactactccgagaccatgaccatagaccttatgaacaacgcgatcgtggagcactacttgaaagtgggcagacagaacggggttctggaaagcgacatcggggtaaagtttgacacccgcaacttcagactggggtttgaccccgtcactggtcttgtcatgcctggggtatatacaaacgaagccttccatccagacatcattttgctgccaggatgcggggtggacttcacccacagccgcctgagcaacttgttgggcatccgcaagcggcaacccttccaggagggctttaggatcacctacgatgatctggagggtggtaacattcccgcactgttggatgtggacgcctaccaggcgagcttgaaagatgacaccgaacagggcgggggtggcgcaggcggcagcaacagcagtggcagcggcgcggaagagaactccaacgcggcagccgcggcaatgcagccggtggaggacatgaacgatcatgccattcgcggcgacacctttgccacacgggctgaggagaagcgcgctgaggccgaagcagcggccgaagctgccgcccccgctgcgcaacccgaggtcgagaagcctcagaagaaaccggtgatcaaacccctgacagaggacagcaagaaacgcagttacaacctaataagcaatgacagcaccttcacccagtaccgcagctggtaccttgcatacaactacggcgaccctcagaccggaatccgctcatggaccctgctttgcactcctgacgtaacctgcggctcggagcaggtctactggtcgttgccagacatgatgcaagaccccgtgaccttccgctccacgcgccagatcagcaactttccggtggtgggcgccgagctgttgcccgtgcactccaagagcttctacaacgaccaggccgtctactcccaactcatccgccagtttacctctctgacccacgtgttcaatcgctttcccgagaaccagattttggcgcgcccgccagcccccaccatcaccaccgtcagtgaaaacgttcctgctctcacagatcacgggacgctaccgctgcgcaacagcatcggaggagtccagcgagtgaccattactgacgccagacgccgcacctgcccctacgtttacaaggccctgggcatagtctcgccgcgcgtcctatcgagccgcactttttgagcaagcatgtccatccttatatcgcccagcaataacacaggctggggcctgcgcttcccaagcaagatgtttggcggggccaagaagcgctccgaccaacacccagtgcgcgtgcgcgggcactaccgcgcgccctggggcgcgcacaaacgcggccgcactgggcgcaccaccgtcgatgacgccatcgacgcggtggtggaggaggcgcgcaactacacgcccacgccgccaccagtgtccacagtggacgcggccattcagaccgtggtgcgcggagcccggcgctatgctaaaatgaagagacggcggaggcgcgtagcacgtcgccaccgccgccgacccggcactgccgcccaacgcgcggcggcggccctgcttaaccgcgcacgtcgcaccggccgacgggcggccatgcgggccgctcgaaggctggccgcgggtattgtcactgtgccccccaggtccaggcgacgagcggccgccgcagcagccgcggccattagtgctatgactcagggtcgcaggggcaacgtgtattgggtgcgcgactcggttagcggcctgcgcgtgcccgtgcgcacccgccccccgcgcaactagattgcaagaaaaaactacttagactcgtactgttgtatgtatccagcggcggcggcgcgcaacgaagctatgtccaagcgcaaaatcaaagaagagatgctccaggtcatcgcgccggagatctatggccccccgaagaaggaagagcaggattacaagccccgaaagctaaagcgggtcaaaaagaaaaagaaagatgatgatgatgaacttgacgacgaggtggaactgctgcacgctaccgcgcccaggcgacgggtacagtggaaaggtcgacgcgtaaaacgtgttttgcgacccggcaccaccgtagtctttacgcccggtgagcgctccacccgcacctacaagcgcgtgtatgatgaggtgtacggcgacgaggacctgcttgagcaggccaacgagcgcctcggggagtttgcctacggaaagcggcataaggacatgctggcgttgccgctggacgagggcaacccaacacctagcctaaagcccgtaacactgcagcaggtgctgcccgcgcttgcaccgtccgaagaaaagcgcggcctaaagcgcgagtctggtgacttggcacccaccgtgcagctgatggtacccaagcgccagcgactggaagatgtcttggaaaaaatgaccgtggaacctgggctggagcccgaggtccgcgtgcggccaatcaagcaggtggcgccgggactgggcgtgcagaccgtggacgttcagatacccactaccagtagcaccagtattgccaccgccacagagggcatggagacacaaacgtccccggttgcctcagcggtggcggatgccgcggtgcaggcggtcgctgcggccgcgtccaagacctctacggaggtgcaaacggacccgtggatgtttcgcgtttcagccccccggcgcccgcgccgttcgaggaagtacggcgccgccagcgcgctactgcccgaatatgccctacatccttccattgcgcctacccccggctatcgtggctacacctaccgccccagaagacgagcaactacccgacgccgaaccaccactggaacccgccgccgccgtcgccgtcgccagcccgtgctggccccgatttccgtgcgcagggtggctcgcgaaggaggcaggaccctggtgctgccaacagcgcgctaccaccccagcatcgtttaaaagccggtctttgtggttcttgcagatatggccctcacctgccgcctccgtttcccggtgccgggattccgaggaagaatgcaccgtaggaggggcatggccggccacggcctgacgggcggcatgcgtcgtgcgcaccaccggcggcggcgcgcgtcgcaccgtcgcatgcgcggcggtatcctgcccctccttattccactgatcgccgcggcgattggcgccgtgcccggaattgcatccgtggccttgcaggcgcagagacactgattaaaaacaagttgcatgtggaaaaatcaaaataaaaagtctggactctcacgctcgcttggtcctgtaactattttgtagaatggaagacatcaactttgcgtctctggccccgcgacacggctcgcgcccgttcatgggaaactggcaagatatcggcaccagcaatatgagcggtggcgccttcagctggggctcgctgtggagcggcattaaaaatttcggttccaccgttaagaactatggcagcaaggcctggaacagcagcacaggccagatgctgagggataagttgaaagagcaaaatttccaacaaaaggtggtagatggcctggcctctggcattagcggggtggtggacctggccaaccaggcagtgcaaaataagattaacagtaagcttgatccccgccctcccgtagaggagcctccaccggccgtggagacagtgtctccagaggggcgtggcgaaaagcgtccgcgccccgacagggaagaaactctggtgacgcaaatagacgagcctccctcgtacgaggaggcactaaagcaaggcctgcccaccacccgtcccatcgcgcccatggctaccggagtgctgggccagcacacacccgtaacgctggacctgcctccccccgccgacacccagcagaaacctgtgctgccaggcccgaccgccgttgttgtaacccgtcctagccgcgcgtccctgcgccgcgccgccagcggtccgcgatcgttgcggcccgtagccagtggcaactggcaaagcacactgaacagcatcgtgggtctgggggtgcaatccctgaagcgccgacgatgcttctgatagctaacgtgtcgtatgtgtgtcatgtatgcgtccatgtcgccgccagaggagctgctgagccgccgcgcgcccgctttccaagatggctaccccttcgatgatgccgcagtggtcttacatgcacatctcgggccaggacgcctcggagtacctgagccccgggctggtgcagtttgcccgcgccaccgagacgtacttcagcctgaataacaagtttagaaaccccacggtggcgcctacgcacgacgtgaccacagaccggtcccagcgtttgacgctgcggttcatccctgtggaccgtgaggatactgcgtactcgtacaaggcgcggttcaccctagctgtgggtgataaccgtgtgctggacatggcttccacgtactttgacatccgcggcgtgctggacaggggccctacttttaagccctactctggcactgcctacaacgccctggctcccaagggtgccccaaatccttgcgaatgggatgaagctgctactgctcttgaaataaacctagaagaagaggacgatgacaacgaagacgaagtagacgagcaagctgagcagcaaaaaactcacgtatttgggcaggcgccttattctggtataaatattacaaaggagggtattcaaataggtgtcgaaggtcaaacacctaaatatgccgataaaacatttcaacctgaacctcaaataggagaatctcagtggtacgaaacagaaattaatcatgcagctgggagagtcctaaaaaagactaccccaatgaaaccatgttacggttcatatgcaaaacccacaaatgaaaatggagggcaaggcattcttgtaaagcaacaaaatggaaagctagaaagtcaagtggaaatgcaatttttctcaactactgaggcagccgcaggcaatggtgataacttgactcctaaagtggtattgtacagtgaagatgtagatatagaaaccccagacactcatatttcttacatgcccactattaaggaaggtaactcacgagaactaatgggccaacaatctatgcccaacaggcctaattacattgcttttagggacaattttattggtctaatgtattacaacagcacgggtaatatgggtgttctggcgggccaagcatcgcagttgaatgctgttgtagatttgcaagacagaaacacagagctttcataccagcttttgcttgattccattggtgatagaaccaggtacttttctatgtggaatcaggctgttgacagctatgatccagatgttagaattattgaaaatcatggaactgaagatgaacttccaaattactgctttccactgggaggtgtgattaatacagagactcttaccaaggtaaaacctaaaacaggtcaggaaaatggatgggaaaaagatgctacagaattttcagataaaaatgaaataagagttggaaataattttgccatggaaatcaatctaaatgccaacctgtggagaaatttcctgtactccaacatagcgctgtatttgcccgacaagctaaagtacagtccttccaacgtaaaaatttctgataacccaaacacctacgactacatgaacaagcgagtggtggctcccgggctagtggactgctacattaaccttggagcacgctggtcccttgactatatggacaacgtcaacccatttaaccaccaccgcaatgctggcctgcgctaccgctcaatgttgctgggcaatggtcgctatgtgcccttccacatccaggtgcctcagaagttctttgccattaaaaacctccttctcctgccgggctcatacacctacgagtggaacttcaggaaggatgttaacatggttctgcagagctccctaggaaatgacctaagggttgacggagccagcattaagtttgatagcatttgcctttacgccaccttcttccccatggcccacaacaccgcctccacgcttgaggccatgcttagaaacgacaccaacgaccagtcctttaacgactatctctccgccgccaacatgctctaccctatacccgccaacgctaccaacgtgcccatatccatcccctcccgcaactgggcggctttccgcggctgggccttcacgcgccttaagactaaggaaaccccatcactgggctcgggctacgacccttattacacctactctggctctataccctacctagatggaaccttttacctcaaccacacctttaagaaggtggccattacctttgactcttctgtcagctggcctggcaatgaccgcctgcttacccccaacgagtttgaaattaagcgctcagttgacggggagggttacaacgttgcccagtgtaacatgaccaaagactggttcctggtacaaatgctagctaactataacattggctaccagggcttctatatcccagagagctacaaggaccgcatgtactccttctttagaaacttccagcccatgagccgtcaggtggtggatgatactaaatacaaggactaccaacaggtgggcatcctacaccaacacaacaactctggatttgttggctaccttgcccccaccatgcgcgaaggacaggcctaccctgctaacttcccctatccgcttataggcaagaccgcagttgacagcattacccagaaaaagtttctttgcgatcgcaccctttggcgcatcccattctccagtaactttatgtccatgggcgcactcacagacctgggccaaaaccttctctacgccaactccgcccacgcgctagacatgacttttgaggtggatcccatggacgagcccacccttctttatgttttgtttgaagtctttgacgtggtccgtgtgcaccagccgcaccgcggcgtcatcgaaaccgtgtacctgcgcacgcccttctcggccggcaacgccacaacataaagaagcaagcaacatcaacaacagctgccgccatgggctccagtgagcaggaactgaaagccattgtcaaagatcttggttgtgggccatattttttgggcacctatgacaagcgctttccaggctttgtttctccacacaagctcgcctgcgccatagtcaatacggccggtcgcgagactgggggcgtacactggatggcctttgcctggaacccgcactcaaaaacatgctacctctttgagccctttggcttttctgaccagcgactcaagcaggtttaccagtttgagtacgagtcactcctgcgccgtagcgccattgcttcttcccccgaccgctgtataacgctggaaaagtccacccaaagcgtacaggggcccaactcggccgcctgtggactattctgctgcatgtttctccacgcctttgccaactggccccaaactcccatggatcacaaccccaccatgaaccttattaccggggtacccaactccatgctcaacagtccccaggtacagcccaccctgcgtcgcaaccaggaacagctctacagcttcctggagcgccactcgccctacttccgcagccacagtgcgcagattaggagcgccacttctttttgtcacttgaaaaacatgtaaaaataatgtactagagacactttcaataaaggcaaatgcttttatttgtacactctcgggtgattatttacccccacccttgccgtctgcgccgtttaaaaatcaaaggggttctgccgcgcatcgctatgcgccactggcagggacacgttgcgatactggtgtttagtgctccacttaaactcaggcacaaccatccgcggcagctcggtgaagttttcactccacaggctgcgcaccatcaccaacgcgtttagcaggtcgggcgccgatatcttgaagtcgcagttggggcctccgccctgcgcgcgcgagttgcgatacacagggttgcagcactggaacactatcagcgccgggtggtgcacgctggccagcacgctcttgtcggagatcagatccgcgtccaggtcctccgcgttgctcagggcgaacggagtcaactttggtagctgccttcccaaaaagggcgcgtgcccaggctttgagttgcactcgcaccgtagtggcatcaaaaggtgaccgtgcccggtctgggcgttaggatacagcgcctgcataaaagccttgatctgcttaaaagccacctgagcctttgcgccttcagagaagaacatgccgcaagacttgccggaaaactgattggccggacaggccgcgtcgtgcacgcagcaccttgcgtcggtgttggagatctgcaccacatttcggccccaccggttcttcacgatcttggccttgctagactgctccttcagcgcgcgctgcccgttttcgctcgtcacatccatttcaatcacgtgctccttatttatcataatgcttccgtgtagacacttaagctcgccttcgatctcagcgcagcggtgcagccacaacgcgcagcccgtgggctcgtgatgcttgtaggtcacctctgcaaacgactgcaggtacgcctgcaggaatcgccccatcatcgtcacaaaggtcttgttgctggtgaaggtcagctgcaacccgcggtgctcctcgttcagccaggtcttgcatacggccgccagagcttccacttggtcaggcagtagtttgaagttcgcctttagatcgttatccacgtggtacttgtccatcagcgcgcgcgcagcctccatgcccttctcccacgcagacacgatcggcacactcagcgggttcatcaccgtaatttcactttccgcttcgctgggctcttcctcttcctcttgcgtccgcataccacgcgccactgggtcgtcttcattcagccgccgcactgtgcgcttacctcctttgccatgcttgattagcaccggtgggttgctgaaacccaccatttgtagcgccacatcttctctttcttcctcgctgtccacgattacctctggtgatggcgggcgctcgggcttgggagaagggcgcttctttttcttcttgggcgcaatggccaaatccgccgccgaggtcgatggccgcgggctgggtgtgcgcggcaccagcgcgtcttgtgatgagtcttcctcgtcctcggactcgatacgccgcctcatccgcttttttgggggcgcccggggaggcggcggcgacggggacggggacgacacgtcctccatggttgggggacgtcgcgccgcaccgcgtccgcgctcgggggtggtttcgcgctgctcctcttcccgactggccatttccttctcctataggcagaaaaagatcatggagtcagtcgagaagaaggacagcctaaccgccccctctgagttcgccaccaccgcctccaccgatgccgccaacgcgcctaccaccttccccgtcgaggcacccccgcttgaggaggaggaagtgattatcgagcaggacccaggttttgtaagcgaagacgacgaggaccgctcagtaccaacagaggataaaaagcaagaccaggacaacgcagaggcaaacgaggaacaagtcgggcggggggacgaaaggcatggcgactacctagatgtgggagacgacgtgctgttgaagcatctgcagcgccagtgcgccattatctgcgacgcgttgcaagagcgcagcgatgtgcccctcgccatagcggatgtcagccttgcctacgaacgccacctattctcaccgcgcgtaccccccaaacgccaagaaaacggcacatgcgagcccaacccgcgcctcaacttctaccccgtatttgccgtgccagaggtgcttgccacctatcacatctttttccaaaactgcaagatacccctatcctgccgtgccaaccgcagccgagcggacaagcagctggccttgcggcagggcgctgtcatacctgatatcgcctcgctcaacgaagtgccaaaaatctttgagggtcttggacgcgacgagaagcgcgcggcaaacgctctgcaacaggaaaacagcgaaaatgaaagtcactctggagtgttggtggaactcgagggtgacaacgcgcgcctagccgtactaaaacgcagcatcgaggtcacccactttgcctacccggcacttaacctaccccccaaggtcatgagcacagtcatgagtgagctgatcgtgcgccgtgcgcagcccctggagagggatgcaaatttgcaagaacaaacagaggagggcctacccgcagttggcgacgagcagctagcgcgctggcttcaaacgcgcgagcctgccgacttggaggagcgacgcaaactaatgatggccgcagtgctcgttaccgtggagcttgagtgcatgcagcggttctttgctgacccggagatgcagcgcaagctagaggaaacattgcactacacctttcgacagggctacgtacgccaggcctgcaagatctccaacgtggagctctgcaacctggtctcctaccttggaattttgcacgaaaaccgccttgggcaaaacgtgcttcattccacgctcaagggcgaggcgcgccgcgactacgtccgcgactgcgtttacttatttctatgctacacctggcagacggccatgggcgtttggcagcagtgcttggaggagtgcaacctcaaggagctgcagaaactgctaaagcaaaacttgaaggacctatggacggccttcaacgagcgctccgtggccgcgcacctggcggacatcattttccccgaacgcctgcttaaaaccctgcaacagggtctgccagacttcaccagtcaaagcatgttgcagaactttaggaactttatcctagagcgctcaggaatcttgcccgccacctgctgtgcacttcctagcgactttgtgcccattaagtaccgcgaatgccctccgccgctttggggccactgctaccttctgcagctagccaactaccttgcctaccactctgacataatggaagacgtgagcggtgacggtctactggagtgtcactgtcgctgcaacctatgcaccccgcaccgctccctggtttgcaattcgcagctgcttaacgaaagtcaaattatcggtacctttgagctgcagggtccctcgcctgacgaaaagtccgcggctccggggttgaaactcactccggggctgtggacgtcggcttaccttcgcaaatttgtacctgaggactaccacgcccacgagattaggttctacgaagaccaatcccgcccgcctaatgcggagcttaccgcctgcgtcattacccagggccacattcttggccaattgcaagccatcaacaaagcccgccaagagtttctgctacgaaagggacggggggtttacttggacccccagtccggcgaggagctcaacccaatccccccgccgccgcagccctatcagcagcagccgcgggcccttgcttcccaggatggcacccaaaaagaagctgcagctgccgccgccacccacggacgaggaggaatactgggacagtcaggcagaggaggttttggacgaggaggaggaggacatgatggaagactgggagagcctagacgaggaagcttccgaggtcgaagaggtgtcagacgaaacaccgtcaccctcggtcgcattcccctcgccggcgccccagaaatcggcaaccggttccagcatggctacaacctccgctcctcaggcgccgccggcactgcccgttcgccgacccaaccgtagatgggacaccactggaaccagggccggtaagtccaagcagccgccgccgttagcccaagagcaacaacagcgccaaggctaccgctcatggcgcgggcacaagaacgccatagttgcttgcttgcaagactgtgggggcaacatctccttcgcccgccgctttcttctctaccatcacggcgtggccttcccccgtaacatcctgcattactaccgtcatctctacagcccatactgcaccggcggcagcggcagcaacagcagcggccacacagaagcaaaggcgaccggatagcaagactctgacaaagcccaagaaatccacagcggcggcagcagcaggaggaggagcgctgcgtctggcgcccaacgaacccgtatcgacccgcgagcttagaaacaggatttttcccactctgtatgctatatttcaacagagcaggggccaagaacaagagctgaaaataaaaaacaggtctctgcgatccctcacccgcagctgcctgtatcacaaaagcgaagatcagcttcggcgcacgctggaagacgcggaggctctcttcagtaaatactgcgcgctgactcttaaggactagtttcgcgccctttctcaaatttaagcgcgaaaactacgtcatctccagcggccacacccggcgccagcacctgttgtcagcgccattatgagcaaggaaattcccacgccctacatgtggagttaccagccacaaatgggacttgcggctggagctgcccaagactactcaacccgaataaactacatgagcgcgggaccccacatgatatcccgggtcaacggaatacgcgcccaccgaaaccgaattctcctggaacaggcggctattaccaccacacctcgtaataaccttaatccccgtagttggcccgctgccctggtgtaccaggaaagtcccgctcccaccactgtggtacttcccagagacgcccaggccgaagttcagatgactaactcaggggcgcagcttgcgggcggctttcgtcacagggtgcggtcgcccgggcagggtataactcacctgacaatcagagggcgaggtattcagctcaacgacgagtcggtgagctcctcgcttggtctccgtccggacgggacatttcagatcggcggcgccggccgctcttcattcacgcctcgtcaggcaatcctaactctgcagacctcgtcctctgagccgcgctctggaggcattggaactctgcaatttattgaggagtttgtgccatcggtctactttaaccccttctcgggacctcccggccactatccggatcaatttattcctaactttgacgcggtaaaggactcggcggacggctacgactgaatgttaagtggagaggcagagcaactgcgcctgaaacacctggtccactgtcgccgccacaagtgctttgcccgcgactccggtgagttttgctactttgaattgcccgaggatcatatcgagggcccggcgcacggcgtccggcttaccgcccagggagagcttgcccgtagcctgattcgggagtttacccagcgccccctgctagttgagcgggacaggggaccctgtgttctcactgtgatttgcaactgtcctaaccctggattacatcaagatcctctagttaatgtcaggtcgcctaagtcgattaactagagtacccggggatcttattccctttaactaataaaaaaaaataataaagcatcacttacttaaaatcagttagcaaatttctgtccagtttattcagcagcacctccttgccctcctcccagctctggtattgcagcttcctcctggctgcaaactttctccacaatctaaatggaatgtcagtttcctcctgttcctgtccatccgcacccactatcttcatgttgttgcagatgaagcgcgcaagaccgtctgaagataccttcaaccccgtgtatccatatgacacggaaaccggtcctccaactgtgccttttcttactcctccctttgtatcccccaatgggtttcaagagagtccccctggggtactctctttgcgcctatccgaacctctagttacctccaatggcatgcttgcgctcaaaatgggcaacggcctctctctggacgaggccggcaaccttacctcccaaaatgtaaccactgtgagcccacctctcaaaaaaaccaagtcaaacataaacctggaaatatctgcacccctcacagttacctcagaagccctaactgtggctgccgccgcacctctaatggtcgcgggcaacacactcaccatgcaatcacaggccccgctaaccgtgcacgactccaaacttagcattgccacccaaggacccctcacagtgtcagaaggaaagctagccctgcaaacatcaggccccctcaccaccaccgatagcagtacccttactatcactgcctcaccccctctaactactgccactggtagcttgggcattgacttgaaagagcccatttatacacaaaatggaaaactaggactaaagtacggggctcctttgcatgtaacagacgacctaaacactttgaccgtagcaactggtccaggtgtgactattaataatacttccttgcaaactaaagttactggagccttgggttttgattcacaaggcaatatgcaacttaatgtagcaggaggactaaggattgattctcaaaacagacgccttatacttgatgttagttatccgtttgatgctcaaaaccaactaaatctaagactaggacagggccctctttttataaactcagcccacaacttggatattaactacaacaaaggcctttacttgtttacagcttcaaacaattccaaaaagcttgaggttaacctaagcactgccaaggggttgatgtttgacgctacagccatagccattaatgcaggagatgggcttgaatttggttcacctaatgcaccaaacacaaatcccctcaaaacaaaaattggccatggcctagaatttgattcaaacaaggctatggttcctaaactaggaactggccttagttttgacagcacaggtgccattacagtaggaaacaaaaataatgataagctaactttgtggaccggaataaaccctccacctaactgtcaaattgtggaaaacactaatacaaatgatggcaaacttactttagtattagtaaaaaatggagggcttgttaatggctacgtgtctctagttggtgtatcagacactgtgaaccaaatgttcacacaaaagacagcaaacatccaattaagattatattttgactcttctggaaatctattaactgaggaatcagacttaaaaattccacttaaaaataaatcttctacagcgaccagtgaaactgtagccagcagcaaagcctttatgccaagtactacagcttatcccttcaacaccactactagggatagtgaaaactacattcatggaatatgttactacatgactagttatgatagaagtctatttcccttgaacatttctataatgctaaacagccgtatgatttcttccaatgttgcctatgccatacaatttgaatggaatctaaatgcaagtgaatctccagaaagcaacatagctacgctgaccacatccccctttttcttttcttacattacagaagacgacaactaaagaatcgtttgtgttatgtttcaacgtgtttatttttcaattgcagaaaatttcaagtcatttttcattcagtagtatagccccaccaccacatagcttatacagatcaccgtaccttaatcaaactcacagaaccctagtattcaacctgccacctccctcccaacacacagagtacacagtcctttctccccggctggccttaaaaagcatcatatcatgggtaacagacatattcttaggtgttatattccacacggtttcctgtcgagccaaacgctcatcagtgatattaataaactccccgggcagctcacttaagttcatgtcgctgtccagctgctgagccacaggctgctgtccaacttgcggttgcttaacgggcggcgaaggagaagtccacgcctacatgggggtagagtcataatcgtgcatcaggatagggcggtggtgctgcagcagcgcgcgaataaactgctgccgccgccgctccgtcctgcaggaatacaacatggcagtggtctcctcagcgatgattcgcaccgcccgcagcataaggcgccttgtcctccgggcacagcagcgcaccctgatctcacttaaatcagcacagtaactgcagcacagcaccacaatattgttcaaaatcccacagtgcaaggcgctgtatccaaagctcatggcggggaccacagaacccacgtggccatcataccacaagcgcaggtagattaagtggcgacccctcataaacacgctggacataaacattacctcttttggcatgttgtaattcaccacctcccctctgattaaacatggcgccatccaccaccatcctaaaccagctggccaaaacctgcccgccggctatacactgcagggaaccgggactggaacaatgacagtggagagcccaggactcgtaaccatggatcatcatgctcgtcatgatatcaatgttggcacaacacaggcacacgtgcatacacttcctcaggattacaagctcctcccgcgttagaaccatatcccagggaacaacccattcctgaatcagcgtaaatcccacactgcagggaagacctcgcacgtaactcacgttgtgcattgtcaaagtgttacattcgggcagcagcggatgatcctccagtatggtagcgcgggtttctgtctcaaaaggaggtagacgatccctactgtacggagtgcgccgagacaaccgagatcgtgttggtcgtagtgtcatgccaaatggaacgccggacgtagtcatatttcctgaagcaaaaccaggtgcgggcgtgacaaacagatctgcgtctccggtctcgccgcttagatcgctctgtgtagtagttgtagtatatccactctctcaaagcatccaggcgccccctggcttcgggttctatgtaaactccttcatgcgccgctgccctgataacatccaccaccgcagaataagccacacccagccaacctacacattcgttctgcgagtcacacacgggaggagcgggaagagctggaagaaccatgtttttttttttattccaaaagattatccaaaacctcaaaatgaagatctattaagtgaacgcgctcccctccggtggcgtggtcaaactctacagccaaagaacagataatggcatttgtaagatgttgcacaatggcttccaaaaggcaaacggccctcacgtccaagtggacgtaaaggctaaacccttcagggtgaatctcctctataaacattccagcaccttcaaccatgcccaaataattctcatctcgccaccttctcaatatatctctaagcaaatcccgaatattaagtccggccattgtaaaaatctgctccagagcgccctccaccttcagcctcaagcagcgaatcatgattgcaaaaattcaggttcctcacagacctgtataagattcaaaagcggaacattaacaaaaataccgcgatcccgtaggtcccttcgcagggccagctgaacataatcgtgcaggtctgcacggaccagcgcggccacttccccgccaggaaccatgacaaaagaacccacactgattatgacacgcatactcggagctatgctaaccagcgtagccccgatgtaagcttgttgcatgggcggcgatataaaatgcaaggtgctgctcaaaaaatcaggcaaagcctcgcgcaaaaaagaaagcacatcgtagtcatgctcatgcagataaaggcaggtaagctccggaaccaccacagaaaaagacaccatttttctctcaaacatgtctgcgggtttctgcataaacacaaaataaaataacaaaaaaacatttaaacattagaagcctgtcttacaacaggaaaaacaacccttataagcataagacggactacggccatgccggcgtgaccgtaaaaaaactggtcaccgtgattaaaaagcaccaccgacagctcctcggtcatgtccggagtcataatgtaagactcggtaaacacatcaggttgattcacatcggtcagtgctaaaaagcgaccgaaatagcccgggggaatacatacccgcaggcgtagagacaacattacagcccccataggaggtataacaaaattaataggagagaaaaacacataaacacctgaaaaaccctcctgcctaggcaaaatagcaccctcccgctccagaacaacatacagcgcttccacagcggcagccataacagtcagccttaccagtaaaaaagaaaacctattaaaaaaacaccactcgacacggcaccagctcaatcagtcacagtgtaaaaaagggccaagtgcagagcgagtatatataggactaaaaaatgacgtaacggttaaagtccacaaaaaacacccagaaaaccgcacgcgaacctacgcccagaaacgaaagccaaaaaacccacaacttcctcaaatcgtcacttccgttttcccacgttacgtcacttcccattttaagaaaactacaattcccaacacatacaagttactccgccctaaaacctacgtcacccgccccgttcccacgccccgcgccacgtcacaaactccaccccctcattatcatattggcttcaatccaaaataaggtatattattgatgatg

SEQ ID NO: 16 - DNA, 37105 bp, Artificial Sequence
  Adk35RF-Spike/E4orf6-E4dl355(E4re#11)
ttaattaacatcatcaataatataccttattttggattgaagccaatatgataatgagggggtggagtttgtgacgtggcgcggggcgtgggaacggggcgggtgacgtagtagtgtggcggaagtgtgatgttgcaagtgtggcggaacacatgtaagcgacggatgtggcaaaagtgacgtttttggtgtgcgccggtgtacacaggaagtgacaattttcgcgcggttttaggcggatgttgtagtaaatttgggcgtaaccgagtaagatttggccattttcgcgggaaaactgaataagaggaagtgaaatctgaataattttgtgttactcatagcgcgtaataatttgatccgcgttaagatacattgatgagtttggacaaaccacaactagaatgcagtgaaaaaaatgctttatttgtgaaatttgtgatgctattgctttatttgtaaccattataagctgcaataaacaagttaacaacaacaattgcattcattttatgtttcaggttcagggggaggtgtgggaggttttttaaagcaagtaaaacctctacaaatgtggtatggctgattatgatcaattttcatggccacttgatgtattgttcatatttgcccagttcttggaggtcaatcagggactcattcaggttcttagccacctcattcagtctgtcaatctccttctggatgttcaccacagaggcattgatgccagagatgtctcccaggtccacatcagggctggtgtggttcttgaagtatttgtccagttcctccttgaaggagtccagttcaggttggagtgggtcatagactgtgttgttcacaatgccaatcaccacatcacagttgccagacacaaaggtgttgtctgtggtgataatctgtggttcatagaagttcctctgggtcacaaaccagtgggtgccattgctcacaaacactccctcccttggaaagtgagccttgccatcatggcagatggcaggggctgtggtgaagttcttctcctgggcaggcacataggtcacatgcaggaacaccactccatgaggggcagactgtggaaaactcatcaggtggtagcccttgccacagaagtccaccctcttgctttgtcccagcacacactcactcatcttggtggcagccaggttggcagatgccctaatctcagcagccctgataagttgttgggtcacataggtttggagggattggagtctgcctgtaatcagtctgtcaatctggacctcagcctccaccttgtccagtctgctcaggatgtcattcagcacagaggagatggctccaaagttgctggaaagttgcttcaccagggtgttcagagcctgggcattctggttcaccacatcttggagtttgcccagggcagaggctgtgctggacagggagtcctgaatcttgccaatggcagagttgaactggttggcaatcagtttctggttctcatagagcacattctgggtcactccaatgccattgaacctgtaagccatctgcatagcaaatgggatttggagggctgctcctgctccaaaggtccagccagaggtgatggtgccagccagcagggcagaggtgtattgggcaatcatctcatctgtcagcagtggaggcagcactgtcagtccattgaacttctgggcacaaatcaggtccctggcagcaatgtctcccagacagtctccatattgcttgatgaagccagcatcagccagggtcaccttgttgaacagcaggtcctcaatgaaggacctcttgcttggcttgcttgggtcaggcagaatctggctgaagttgaagcctccaaagtccttgattggaggtgtcttgtaaatctgcttcacctgggcaaacacctcctgggtgttcttgtcctgttccacagcaatgcctgtcagagccctgttaagttgggtacagaaggagccatattggagcagcaggttgctacactctgtgctgtctccacagatatacattgtacagtccacagaggtcttggtcatactcacaggcagaatctctgtggtcacagagatggtgaagttggttgggatggcaatgctgttgttgctgtaagccacagagttctctgctcccagactcattgtgtaggcaatgatgctctggcttgccacagacctcgacccaccgccaccggtctgggtctggtaggaggcacagatgcctgctccaattgggatgtcacactcataggagttgttcacatgctctgctccaatcagacagccagccctggtctggaacacattgctgcctgtgctgtagaccctccaggttggtgtaagttggtcagcatggatagccacaggcacctcagtacagttcacatcctggtagagcacagccacctggttgctggtgttggtgccaggtgtaatcacagacactcctccaaaggaacatggtgtgatgtccagaatctccaaggtctgtgggtccctcacagcatctgtggtgtcagcaatgtccctgccaaactgttggaatggcaggaacttcttgttgctctctgtcagcactcctgtgcctgtcagtccattgaagttgaagttcacacacttgttcttcaccaggttggtgctcttctttggtccacacactgtggcaggggcatggagcagttcaaaggacagcaccaccaccctgtatggttggtagcccactccattggttggttggaagccataggattggagtggaaagtaacagttgaagccctccactccattacatggtgtgctgccagcctggtaaatctctgtgctgatgtccctctcaaatggtttcaggttgctcttcctgaacagtctgtagaggtagttgtagttgcctcccaccttgctgtccaggttgttgctgttccaggcaatcacacagcctgtgaagtcatcaggcagtttgtagttgtagtcagcaatcttgcctgtttgtccaggggcaatctgtctcacctcatctcccctaatcacaaaggagtcagcatagacattggtgaaacacaggtcattcagtttggttgggctcactccataacacttgaaggtgctgaaggaggcagagttgtagagcacagagtagtcagccacacagttgctaatcctcttcctgttccaggcatagacagaggcaaacctggtggcattgaacacctctccaaatggacacaggttggtgatgtttggaaacctcacaatgctctctgttggttggaccctgaagttgctggtctggtagatgcccttctccactgtgaaggatttcagggtacacttggtctcagacagtgggtccagggcacagtccacagcatctgtgatggtgccattctcattgtatttcagcaggaaggtccttggttggaggtagcccacatagtaggctgctgctcctgctgtccagccagaggaggagtctccaggtgtcaggtaggacctgtgcagagccagcagggtctggaacctggtgatgttgatgccaattggcaggtccaccagtggttccaaggcagagaagccctgtggcaggtccctcaccaggttgattggtgtgtgtttgctgtaaatcttgaagtagccatcaatgttcttgaacacaaactccctcaggttcttgaagttgccctgcttgccctccaagtccatcaggaatggttggctcacatattcaaaggtacagttgttggcagaggagtagaccctgaactcagactccatccaggacttgttgttcttgtggtagtagactcccaggaatgggtcattacagaactggaactcacacaccttaatcaccacattggtggcattgttcacaatcagcagggactgggtcttgctgtccagggtggtgccaaaaatccagcccctgatgatgttgctcttctctgtgctggcaaagtagactccatcattgaatggcagcacagggttgtcaaacctcttggtgccattggtgccagacacatggatggcatggaaccaggtcacattgctgaagaatggcaggaacaggtcctgggtgctgtgcagcacagaggacctgaacaccttgtcagggtagtagactcccctggtgaaggagttggtgtaggcaggaggaagttgggtcctggtggtcaggttcacacactggctggacaccagtggcagcagcaccaggaacacaaacatggtggcaaatcggaggctggatcggtcccggtgtcttctatggaggtcaaaacagcgtggatggcgtctccaggcgatctgacggttcactaaacgagctcgtcgacgatctctatcactgatagggagatctctatcactgatagggagagctctgcttatatagacctcccaccgtacacgcctaccgcccatttgcgtcaatggggcggagttgttacgacattttggaaagtcccgttgattttggtgccaaaacaaactcccattgacgtcaatggggtggagacttggaaatccccgtgagtcaaaccgctatccacgcccattgatgtactgccaaaaccgcatcaccatggtaatagcgatgactaatacgtagatgtactgccaagtaggaaagtcccataaggtcatgtactgggcataatgccaggcgggccatttaccgtcattgacgtcaatagggggcgtacttggcatatgatacacttgatgtactgccaagtgggcagtttaccgtaaatactccacccattgacgtcaatggaaagtccctattggcgttactatgggaacatacgtcattattgacgtcaatgggcgggggtcgttgggcggtcagccaggcgggccatttaccgtaagttatgtaacgcggaactccatatatgggctatgaactaatgaccccgtaattgattactattacaggctccggtgcccgtcagtgggcagagcgcacatcgcccacagtccccgagaagttggggggaggggtcggcaattgaaccggtgcctagagaaggtggcgcggggtaaactgggaaagtgatgtcgtgtactggctccgcctttttcccgagggtgggggagaaccgtatataagtgcagtagtcgccgtgaacgttctttttcgcaacgggtttgccgccagaacacaggtaagtgccgtgtgtggttcccgcgggcctggcctctttacgggttatggcccttgcgtgccttgaattacttccacgcccctggctgcagtacgtgattcttgatcccgagcttcgggttggaagtgggtgggagagttcgaggccttgcgcttaaggagccccttcgcctcgtgcttgagttgaggcttggcctgggcgctggggccgccgcgtgcgaatctggtggcaccttcgcgcctgtctcgctgctttcgataagtctctagccatttaaaatttttgatgacctgctgcgacgctttttttctggcaagatagtcttgtaaatgcgggccaagatctgcacactggtatttcggtttttggggccgcgggcggcgacggggcccgtgcgtcccagcgcacatgttcggcgaggcggggcctgcgagcgcggccaccgagaatcggacgggggtagtctcaagctggccggcctgctctggtgcctggcctcgcgccgccgtgtatcgccccgccctgggcggcaaggctggcccggtcggcaccagttgcgtgagcggaaagatggccgcttcccggccctgctgcagggagctcaaaatggaggacgcggcgctcgggagagcgggcgggtgagtcacccacacaaaggaaaagggcctttccgtcctcagccgtcgcttcatgtgactccacggagtaccgggcgccgtccaggcacctcgattagttctcgagcttttggagtacgtcgtctttaggttggggggaggggttttatgcgatggagtttccccatactgagtgggtggagactgaagttaggccagcttggcacttgatgtaattctccttggaatttgccctttttgagtttggatcttggttcattctcaagcctcagacagtggttcaaagtttttttcttccatttaaggtgtcgtgaaaactaccccaagctggccaccatgactacgtccggcgttccatttggcatgacactacgaccaacacgatctcggttgtctcggcgcactccgtacagtagggatcgtctacctccttttgagacagaaacccgcgctaccatactggaggatcatccgctgctgcccgaatgtaacactttgacaatgcacaacgtgagttacgtgcgaggtcttccctgcagtgtgggatttacgctgattcaggaatgggttgttccctgggatatggttctaacgcgggaggagcttgtaatcctgaggaagtgtatgcacgtgtgcctgtgttgtgccaacattgatatcatgacgagcatgatgatccatggttacgagtcctgggctctccactgtcattgttccagtcccggttccctgcagtgtatagccggcgggcaggttttggccagctggtttaggatggtggtggatggcgccatgtttaatcagaggtttatatggtaccgggaggtggtgaattacaacatgccaaaagaggtaatgtttatgtccagcgtgtttatgaggggtcgccacttaatctacctgcgcttgtggtatgatggccacgtgggttctgtggtccccgccatgagctttggatacagcgccttgcactgtgggattttgaacaatattgtggtgctgtgctgcagttactgtgctgatttaagtgagatcagggtgcgctgctgtgcccggaggacaaggcgccttatgctgcgggcggtgcgaatcatcgctgaggagaccactgccatgttgtattcctgcaggacggagcggcggcggcagcagtttattcgcgcgctgctgcagcaccaccgccctatcctgatgcacgattatgactctacccccatgtagaagcttggggatcaattctctagagctcgctgatcagcctcgactgtgccttctagttgccagccatctgttgtttgcccctcccccgtgccttccttgaccctggaaggtgccactcccactgtcctttcctaataaaatgaggaaattgcatcgcattgtctgagtaggtgtcattctattctggggggtggggtggggcaggacagcaagggggaggattgggaagacaatagcaggcatgctggggatgcggtgggctctatggcttctgaggaaattgggcgtggcttaagggtgggaaagaatatataaggtgggggtcttatgtagttttgtatctgttttgcagcagccgccgccgccatgagcaccaactcgtttgatggaagcattgtgagctcatatttgacaacgcgcatgcccccatgggccggggtgcgtcagaatgtgatgggctccagcattgatggtcgccccgtcctgcccgcaaactctactaccttgacctacgagaccgtgtctggaacgccgttggagactgcagcctccgccgccgcttcagccgctgcagccaccgcccgcgggattgtgactgactttgctttcctgagcccgcttgcaagcagtgcagcttcccgttcatccgcccgcgatgacaagttgacggctcttttggcacaattggattctttgacccgggaacttaatgtcgtttctcagcagctgttggatctgcgccagcaggtttctgccctgaaggcttcctcccctcccaatgcggtttaaaacataaataaaaaaccagactctgtttggatttggatcaagcaagtgtcttgctgtctttatttaggggttttgcgcgcgcggtaggcccgggaccagcggtctcggtcgttgagggtcctgtgtattttttccaggacgtggtaaaggtgactctggatgttcagatacatgggcataagcccgtctctggggtggaggtagcaccactgcagagcttcatgctgcggggtggtgttgtagatgatccagtcgtagcaggagcgctgggcgtggtgcctaaaaatgtctttcagtagcaagctgattgccaggggcaggcccttggtgtaagtgtttacaaagcggttaagctgggatgggtgcatacgtggggatatgagatgcatcttggactgtatttttaggttggctatgttcccagccatatccctccggggattcatgttgtgcagaaccaccagcacagtgtatccggtgcacttgggaaatttgtcatgtagcttagaaggaaatgcgtggaagaacttggagacgcccttgtgacctccaagattttccatgcattcgtccataatgatggcaatgggcccacgggcggcggcctgggcgaagatatttctgggatcactaacgtcatagttgtgttccaggatgagatcgtcataggccatttttacaaagcgcgggcggagggtgccagactgcggtataatggttccatccggcccaggggcgtagttaccctcacagatttgcatttcccacgctttgagttcagatggggggatcatgtctacctgcggggcgatgaagaaaacggtttccggggtaggggagatcagctgggaagaaagcaggttcctgagcagctgcgacttaccgcagccggtgggcccgtaaatcacacctattaccgggtgcaactggtagttaagagagctgcagctgccgtcatccctgagcaggggggccacttcgttaagcatgtccctgactcgcatgttttccctgaccaaatccgccagaaggcgctcgccgcccagcgatagcagttcttgcaaggaagcaaagtttttcaacggtttgagaccgtccgccgtaggcatgcttttgagcgtttgaccaagcagttccaggcggtcccacagctcggtcacctgctctacggcatctcgatccagcatatctcctcgtttcgcgggttggggcggctttcgctgtacggcagtagtcggtgctcgtccagacgggccagggtcatgtctttccacgggcgcagggtcctcgtcagcgtagtctgggtcacggtgaaggggtgcgctccgggctgcgcgctggccagggtgcgcttgaggctggtcctgctggtgctgaagcgctgccggtcttcgccctgcgcgtcggccaggtagcatttgaccatggtgtcatagtccagcccctccgcggcgtggcccttggcgcgcagcttgcccttggaggaggcgccgcacgaggggcagtgcagacttttgagggcgtagagcttgggcgcgagaaataccgattccggggagtaggcatccgcgccgcaggccccgcagacggtctcgcattccacgagccaggtgagctctggccgttcggggtcaaaaaccaggtttcccccatgctttttgatgcgtttcttacctctggtttccatgagccggtgtccacgctcggtgacgaaaaggctgtccgtgtccccgtatacagacttgagaggcctgtcctcgagcggtgttccgcggtcctcctcgtatagaaactcggaccactctgagacaaaggctcgcgtccaggccagcacgaaggaggctaagtgggaggggtagcggtcgttgtccactagggggtccactcgctccagggtgtgaagacacatgtcgccctcttcggcatcaaggaaggtgattggtttgtaggtgtaggccacgtgaccgggtgttcctgaaggggggctataaaagggggtgggggcgcgttcgtcctcactctcttccgcatcgctgtctgcgagggccagctgttggggtgagtactccctctgaaaagcgggcatgacttctgcgctaagattgtcagtttccaaaaacgaggaggatttgatattcacctggcccgcggtgatgcctttgagggtggccgcatccatctggtcagaaaagacaatctttttgttgtcaagcttggtggcaaacgacccgtagagggcgttggacagcaacttggcgatggagcgcagggtttggtttttgtcgcgatcggcgcgctccttggccgcgatgtttagctgcacgtattcgcgcgcaacgcaccgccattcgggaaagacggtggtgcgctcgtcgggcaccaggtgcacgcgccaaccgcggttgtgcagggtgacaaggtcaacgctggtggctacctctccgcgtaggcgctcgttggtccagcagaggcggccgcccttgcgcgagcagaatggcggtagggggtctagctgcgtctcgtccggggggtctgcgtccacggtaaagaccccgggcagcaggcgcgcgtcgaagtagtctatcttgcatccttgcaagtctagcgcctgctgccatgcgcgggcggcaagcgcgcgctcgtatgggttgagtgggggaccccatggcatggggtgggtgagcgcggaggcgtacatgccgcaaatgtcgtaaacgtagaggggctctctgagtattccaagatatgtagggtagcatcttccaccgcggatgctggcgcgcacgtaatcgtatagttcgtgcgagggagcgaggaggtcgggaccgaggttgctacgggcgggctgctctgctcggaagactatctgcctgaagatggcatgtgagttggatgatatggttggacgctggaagacgttgaagctggcgtctgtgagacctaccgcgtcacgcacgaaggaggcgtaggagtcgcgcagcttgttgaccagctcggcggtgacctgcacgtctagggcgcagtagtccagggtttccttgatgatgtcatacttatcctgtcccttttttttccacagctcgcggttgaggacaaactcttcgcggtctttccagtactcttggatcggaaacccgtcggcctccgaacggtaagagcctagcatgtagaactggttgacggcctggtaggcgcagcatcccttttctacgggtagcgcgtatgcctgcgcggccttccggagcgaggtgtgggtgagcgcaaaggtgtccctgaccatgactttgaggtactggtatttgaagtcagtgtcgtcgcatccgccctgctcccagagcaaaaagtccgtgcgctttttggaacgcggatttggcagggcgaaggtgacatcgttgaagagtatctttcccgcgcgaggcataaagttgcgtgtgatgcggaagggtcccggcacctcggaacggttgttaattacctgggcggcgagcacgatctcgtcaaagccgttgatgttgtggcccacaatgtaaagttccaagaagcgcgggatgcccttgatggaaggcaattttttaagttcctcgtaggtgagctcttcaggggagctgagcccgtgctctgaaagggcccagtctgcaagatgagggttggaagcgacgaatgagctccacaggtcacgggccattagcatttgcaggtggtcgcgaaaggtcctaaactggcgacctatggccattttttctggggtgatgcagtagaaggtaagcgggtcttgttcccagcggtcccatccaaggttcgcggctaggtctcgcgcggcagtcactagaggctcatctccgccgaacttcatgaccagcatgaagggcacgagctgcttcccaaaggcccccatccaagtataggtctctacatcgtaggtgacaaagagacgctcggtgcgaggatgcgagccgatcgggaagaactggatctcccgccaccaattggaggagtggctattgatgtggtgaaagtagaagtccctgcgacgggccgaacactcgtgctggcttttgtaaaaacgtgcgcagtactggcagcggtgcacgggctgtacatcctgcacgaggttgacctgacgaccgcgcacaaggaagcagagtgggaatttgagcccctcgcctggcgggtttggctggtggtcttctacttcggctgcttgtccttgaccgtctggctgctcgaggggagttacggtggatcggaccaccacgccgcgcgagcccaaagtccagatgtccgcgcgcggcggtcggagcttgatgacaacatcgcgcagatgggagctgtccatggtctggagctcccgcggcgtcaggtcaggcgggagctcctgcaggtttacctcgcatagacgggtcagggcgcgggctagatccaggtgatacctaatttccaggggctggttggtggcggcgtcgatggcttgcaagaggccgcatccccgcggcgcgactacggtaccgcgcggcgggcggtgggccgcgggggtgtccttggatgatgcatctaaaagcggtgacgcgggcgagcccccggaggtagggggggctccggacccgccgggagagggggcaggggcacgtcggcgccgcgcgcgggcaggagctggtgctgcgcgcgtaggttgctggcgaacgcgacgacgcggcggttgatctcctgaatctggcgcctctgcgtgaagacgacgggcccggtgagcttgaacctgaaagagagttcgacagaatcaatttcggtgtcgttgacggcggcctggcgcaaaatctcctgcacgtctcctgagttgtcttgataggcgatctcggccatgaactgctcgatctcttcctcctggagatctccgcgtccggctcgctccacggtggcggcgaggtcgttggaaatgcgggccatgagctgcgagaaggcgttgaggcctccctcgttccagacgcggctgtagaccacgcccccttcggcatcgcgggcgcgcatgaccacctgcgcgagattgagctccacgtgccgggcgaagacggcgtagtttcgcaggcgctgaaagaggtagttgagggtggtggcggtgtgttctgccacgaagaagtacataacccagcgtcgcaacgtggattcgttgatatcccccaaggcctcaaggcgctccatggcctcgtagaagtccacggcgaagttgaaaaactgggagttgcgcgccgacacggttaactcctcctccagaagacggatgagctcggcgacagtgtcgcgcacctcgcgctcaaaggctacaggggcctcttcttcttcttcaatctcctcttccataagggcctccccttcttcttcttctggcggcggtgggggaggggggacacggcggcgacgacggcgcaccgggaggcggtcgacaaagcgctcgatcatctccccgcggcgacggcgcatggtctcggtgacggcgcggccgttctcgcgggggcgcagttggaagacgccgcccgtcatgtcccggttatgggttggcggggggctgccatgcggcagggatacggcgctaacgatgcatctcaacaattgttgtgtaggtactccgccgccgagggacctgagcgagtccgcatcgaccggatcggaaaacctctcgagaaaggcgtctaaccagtcacagtcgcaaggtaggctgagcaccgtggcgggcggcagcgggcggcggtcggggttgtttctggcggaggtgctgctgatgatgtaattaaagtaggcggtcttgagacggcggatggtcgacagaagcaccatgtccttgggtccggcctgctgaatgcgcaggcggtcggccatgccccaggcttcgttttgacatcggcgcaggtctttgtagtagtcttgcatgagcctttctaccggcacttcttcttctccttcctcttgtcctgcatctcttgcatctatcgctgcggcggcggcggagtttggccgtaggtggcgccctcttcctcccatgcgtgtgaccccgaagcccctcatcggctgaagcagggctaggtcggcgacaacgcgctcggctaatatggcctgctgcacctgcgtgagggtagactggaagtcatccatgtccacaaagcggtggtatgcgcccgtgttgatggtgtaagtgcagttggccataacggaccagttaacggtctggtgacccggctgcgagagctcggtgtacctgagacgcgagtaagccctcgagtcaaatacgtagtcgttgcaagtccgcaccaggtactggtatcccaccaaaaagtgcggcggcggctggcggtagaggggccagcgtagggtggccggggctccgggggcgagatcttccaacataaggcgatgatatccgtagatgtacctggacatccaggtgatgccggcggcggtggtggaggcgcgcggaaagtcgcggacgcggttccagatgttgcgcagcggcaaaaagtgctccatggtcgggacgctctggccggtcaggcgcgcgcaatcgttgacgctctagcgtgcaaaaggagagcctgtaagcgggcactcttccgtggtctggtggataaattcgcaagggtatcatggcggacgaccggggttcgagccccgtatccggccgtccgccgtgatccatgcggttaccgcccgcgtgtcgaacccaggtgtgcgacgtcagacaacgggggagtgctccttttggcttccttccaggcgcggcggctgctgcgctagcttttttggccactggccgcgcgcagcgtaagcggttaggctggaaagcgaaagcattaagtggctcgctccctgtagccggagggttattttccaagggttgagtcgcgggacccccggttcgagtctcggaccggccggactgcggcgaacgggggtttgcctccccgtcatgcaagaccccgcttgcaaattcctccggaaacagggacgagccccttttttgcttttcccagatgcatccggtgctgcggcagatgcgcccccctcctcagcagcggcaagagcaagagcagcggcagacatgcagggcaccctcccctcctcctaccgcgtcaggaggggcgacatccgcggttgacgcggcagcagatggtgattacgaacccccgcggcgccgggcccggcactacctggacttggaggagggcgagggcctggcgcggctaggagcgccctctcctgagcggcacccaagggtgcagctgaagcgtgatacgcgtgaggcgtacgtgccgcggcagaacctgtttcgcgaccgcgagggagaggagcccgaggagatgcgggatcgaaagttccacgcagggcgcgagctgcggcatggcctgaatcgcgagcggttgctgcgcgaggaggactttgagcccgacgcgcgaaccgggattagtcccgcgcgcgcacacgtggcggccgccgacctggtaaccgcatacgagcagacggtgaaccaggagattaactttcaaaaaagctttaacaaccacgtgcgtacgcttgtggcgcgcgaggaggtggctataggactgatgcatctgtgggactttgtaagcgcgctggagcaaaacccaaatagcaagccgctcatggcgcagctgttccttatagtgcagcacagcagggacaacgaggcattcagggatgcgctgctaaacatagtagagcccgagggccgctggctgctcgatttgataaacatcctgcagagcatagtggtgcaggagcgcagcttgagcctggctgacaaggtggccgccatcaactattccatgcttagcctgggcaagttttacgcccgcaagatataccataccccttacgttcccatagacaaggaggtaaagatcgaggggttctacatgcgcatggcgctgaaggtgcttaccttgagcgacgacctgggcgtttatcgcaacgagcgcatccacaaggccgtgagcgtgagccggcggcgcgagctcagcgaccgcgagctgatgcacagcctgcaaagggccctggctggcacgggcagcggcgatagagaggccgagtcctactttgacgcgggcgctgacctgcgctgggccccaagccgacgcgccctggaggcagctggggccggacctgggctggcggtggcacccgcgcgcgctggcaacgtcggcggcgtggaggaatatgacgaggacgatgagtacgagccagaggacggcgagtactaagcggtgatgtttctgatcagatgatgcaagacgcaacggacccggcggtgcgggcggcgctgcagagccagccgtccggccttaactccacggacgactggcgccaggtcatggaccgcatcatgtcgctgactgcgcgcaatcctgacgcgttccggcagcagccgcaggccaaccggctctccgcaattctggaagcggtggtcccggcgcgcgcaaaccccacgcacgagaaggtgctggcgatcgtaaacgcgctggccgaaaacagggccatccggcccgacgaggccggcctggtctacgacgcgctgcttcagcgcgtggctcgttacaacagcggcaacgtgcagaccaacctggaccggctggtgggggatgtgcgcgaggccgtggcgcagcgtgagcgcgcgcagcagcagggcaacctgggctccatggttgcactaaacgccttcctgagtacacagcccgccaacgtgccgcggggacaggaggactacaccaactttgtgagcgcactgcggctaatggtgactgagacaccgcaaagtgaggtgtaccagtctgggccagactattttttccagaccagtagacaaggcctgcagaccgtaaacctgagccaggctttcaaaaacttgcaggggctgtggggggtgcgggctcccacaggcgaccgcgcgaccgtgtctagcttgctgacgcccaactcgcgcctgttgctgctgctaatagcgcccttcacggacagtggcagcgtgtcccgggacacatacctaggtcacttgctgacactgtaccgcgaggccataggtcaggcgcatgtggacgagcatactttccaggagattacaagtgtcagccgcgcgctggggcaggaggacacgggcagcctggaggcaaccctaaactacctgctgaccaaccggcggcagaagatcccctcgttgcacagtttaaacagcgaggaggagcgcattttgcgctacgtgcagcagagcgtgagccttaacctgatgcgcgacggggtaacgcccagcgtggcgctggacatgaccgcgcgcaacatggaaccgggcatgtatgcctcaaaccggccgtttatcaaccgcctaatggactacttgcatcgcgcggccgccgtgaaccccgagtatttcaccaatgccatcttgaacccgcactggctaccgccccctggtttctacaccgggggattcgaggtgcccgagggtaacgatggattcctctgggacgacatagacgacagcgtgttttccccgcaaccgcagaccctgctagagttgcaacagcgcgagcaggcagaggcggcgctgcgaaaggaaagcttccgcaggccaagcagcttgtccgatctaggcgctgcggccccgcggtcagatgctagtagcccatttccaagcttgatagggtctcttaccagcactcgcaccacccgcccgcgcctgctgggcgaggaggagtacctaaacaactcgctgctgcagccgcagcgcgaaaaaaacctgcctccggcatttcccaacaacgggatagagagcctagtggacaagatgagtagatggaagacgtacgcgcaggagcacagggacgtgccaggcccgcgcccgcccacccgtcgtcaaaggcacgaccgtcagcggggtctggtgtgggaggacgatgactcggcagacgacagcagcgtcctggatttgggagggagtggcaacccgtttgcgcaccttcgccccaggctggggagaatgttttaaaaaaaaaaaagcatgatgcaaaataaaaaactcaccaaggccatggcaccgagcgttggttttcttgtattccccttagtatgcggcgcgcggcgatgtatgaggaaggtcctcctccctcctacgagagtgtggtgagcgcggcgccagtggcggcggcgctgggttctcccttcgatgctcccctggacccgccgtttgtgcctccgcggtacctgcggcctaccggggggagaaacagcatccgttactctgagttggcacccctattcgacaccacccgtgtgtacctggtggacaacaagtcaacggatgtggcatccctgaactaccagaacgaccacagcaactttctgaccacggtcattcaaaacaatgactacagcccgggggaggcaagcacacagaccatcaatcttgacgaccggtcgcactggggcggcgacctgaaaaccatcctgcataccaacatgccaaatgtgaacgagttcatgtttaccaataagtttaaggcgcgggtgatggtgtcgcgcttgcctactaaggacaatcaggtggagctgaaatacgagtgggtggagttcacgctgcccgagggcaactactccgagaccatgaccatagaccttatgaacaacgcgatcgtggagcactacttgaaagtgggcagacagaacggggttctggaaagcgacatcggggtaaagtttgacacccgcaacttcagactggggtttgaccccgtcactggtcttgtcatgcctggggtatatacaaacgaagccttccatccagacatcattttgctgccaggatgcggggtggacttcacccacagccgcctgagcaacttgttgggcatccgcaagcggcaacccttccaggagggctttaggatcacctacgatgatctggagggtggtaacattcccgcactgttggatgtggacgcctaccaggcgagcttgaaagatgacaccgaacagggcgggggtggcgcaggcggcagcaacagcagtggcagcggcgcggaagagaactccaacgcggcagccgcggcaatgcagccggtggaggacatgaacgatcatgccattcgcggcgacacctttgccacacgggctgaggagaagcgcgctgaggccgaagcagcggccgaagctgccgcccccgctgcgcaacccgaggtcgagaagcctcagaagaaaccggtgatcaaacccctgacagaggacagcaagaaacgcagttacaacctaataagcaatgacagcaccttcacccagtaccgcagctggtaccttgcatacaactacggcgaccctcagaccggaatccgctcatggaccctgctttgcactcctgacgtaacctgcggctcggagcaggtctactggtcgttgccagacatgatgcaagaccccgtgaccttccgctccacgcgccagatcagcaactttccggtggtgggcgccgagctgttgcccgtgcactccaagagcttctacaacgaccaggccgtctactcccaactcatccgccagtttacctctctgacccacgtgttcaatcgctttcccgagaaccagattttggcgcgcccgccagcccccaccatcaccaccgtcagtgaaaacgttcctgctctcacagatcacgggacgctaccgctgcgcaacagcatcggaggagtccagcgagtgaccattactgacgccagacgccgcacctgcccctacgtttacaaggccctgggcatagtctcgccgcgcgtcctatcgagccgcactttttgagcaagcatgtccatccttatatcgcccagcaataacacaggctggggcctgcgcttcccaagcaagatgtttggcggggccaagaagcgctccgaccaacacccagtgcgcgtgcgcgggcactaccgcgcgccctggggcgcgcacaaacgcggccgcactgggcgcaccaccgtcgatgacgccatcgacgcggtggtggaggaggcgcgcaactacacgcccacgccgccaccagtgtccacagtggacgcggccattcagaccgtggtgcgcggagcccggcgctatgctaaaatgaagagacggcggaggcgcgtagcacgtcgccaccgccgccgacccggcactgccgcccaacgcgcggcggcggccctgcttaaccgcgcacgtcgcaccggccgacgggcggccatgcgggccgctcgaaggctggccgcgggtattgtcactgtgccccccaggtccaggcgacgagcggccgccgcagcagccgcggccattagtgctatgactcagggtcgcaggggcaacgtgtattgggtgcgcgactcggttagcggcctgcgcgtgcccgtgcgcacccgccccccgcgcaactagattgcaagaaaaaactacttagactcgtactgttgtatgtatccagcggcggcggcgcgcaacgaagctatgtccaagcgcaaaatcaaagaagagatgctccaggtcatcgcgccggagatctatggccccccgaagaaggaagagcaggattacaagccccgaaagctaaagcgggtcaaaaagaaaaagaaagatgatgatgatgaacttgacgacgaggtggaactgctgcacgctaccgcgcccaggcgacgggtacagtggaaaggtcgacgcgtaaaacgtgttttgcgacccggcaccaccgtagtctttacgcccggtgagcgctccacccgcacctacaagcgcgtgtatgatgaggtgtacggcgacgaggacctgcttgagcaggccaacgagcgcctcggggagtttgcctacggaaagcggcataaggacatgctggcgttgccgctggacgagggcaacccaacacctagcctaaagcccgtaacactgcagcaggtgctgcccgcgcttgcaccgtccgaagaaaagcgcggcctaaagcgcgagtctggtgacttggcacccaccgtgcagctgatggtacccaagcgccagcgactggaagatgtcttggaaaaaatgaccgtggaacctgggctggagcccgaggtccgcgtgcggccaatcaagcaggtggcgccgggactgggcgtgcagaccgtggacgttcagatacccactaccagtagcaccagtattgccaccgccacagagggcatggagacacaaacgtccccggttgcctcagcggtggcggatgccgcggtgcaggcggtcgctgcggccgcgtccaagacctctacggaggtgcaaacggacccgtggatgtttcgcgtttcagccccccggcgcccgcgccgttcgaggaagtacggcgccgccagcgcgctactgcccgaatatgccctacatccttccattgcgcctacccccggctatcgtggctacacctaccgccccagaagacgagcaactacccgacgccgaaccaccactggaacccgccgccgccgtcgccgtcgccagcccgtgctggccccgatttccgtgcgcagggtggctcgcgaaggaggcaggaccctggtgctgccaacagcgcgctaccaccccagcatcgtttaaaagccggtctttgtggttcttgcagatatggccctcacctgccgcctccgtttcccggtgccgggattccgaggaagaatgcaccgtaggaggggcatggccggccacggcctgacgggcggcatgcgtcgtgcgcaccaccggcggcggcgcgcgtcgcaccgtcgcatgcgcggcggtatcctgcccctccttattccactgatcgccgcggcgattggcgccgtgcccggaattgcatccgtggccttgcaggcgcagagacactgattaaaaacaagttgcatgtggaaaaatcaaaataaaaagtctggactctcacgctcgcttggtcctgtaactattttgtagaatggaagacatcaactttgcgtctctggccccgcgacacggctcgcgcccgttcatgggaaactggcaagatatcggcaccagcaatatgagcggtggcgccttcagctggggctcgctgtggagcggcattaaaaatttcggttccaccgttaagaactatggcagcaaggcctggaacagcagcacaggccagatgctgagggataagttgaaagagcaaaatttccaacaaaaggtggtagatggcctggcctctggcattagcggggtggtggacctggccaaccaggcagtgcaaaataagattaacagtaagcttgatccccgccctcccgtagaggagcctccaccggccgtggagacagtgtctccagaggggcgtggcgaaaagcgtccgcgccccgacagggaagaaactctggtgacgcaaatagacgagcctccctcgtacgaggaggcactaaagcaaggcctgcccaccacccgtcccatcgcgcccatggctaccggagtgctgggccagcacacacccgtaacgctggacctgcctccccccgccgacacccagcagaaacctgtgctgccaggcccgaccgccgttgttgtaacccgtcctagccgcgcgtccctgcgccgcgccgccagcggtccgcgatcgttgcggcccgtagccagtggcaactggcaaagcacactgaacagcatcgtgggtctgggggtgcaatccctgaagcgccgacgatgcttctgatagctaacgtgtcgtatgtgtgtcatgtatgcgtccatgtcgccgccagaggagctgctgagccgccgcgcgcccgctttccaagatggctaccccttcgatgatgccgcagtggtcttacatgcacatctcgggccaggacgcctcggagtacctgagccccgggctggtgcagtttgcccgcgccaccgagacgtacttcagcctgaataacaagtttagaaaccccacggtggcgcctacgcacgacgtgaccacagaccggtcccagcgtttgacgctgcggttcatccctgtggaccgtgaggatactgcgtactcgtacaaggcgcggttcaccctagctgtgggtgataaccgtgtgctggacatggcttccacgtactttgacatccgcggcgtgctggacaggggccctacttttaagccctactctggcactgcctacaacgccctggctcccaagggtgccccaaatccttgcgaatgggatgaagctgctactgctcttgaaataaacctagaagaagaggacgatgacaacgaagacgaagtagacgagcaagctgagcagcaaaaaactcacgtatttgggcaggcgccttattctggtataaatattacaaaggagggtattcaaataggtgtcgaaggtcaaacacctaaatatgccgataaaacatttcaacctgaacctcaaataggagaatctcagtggtacgaaacagaaattaatcatgcagctgggagagtcctaaaaaagactaccccaatgaaaccatgttacggttcatatgcaaaacccacaaatgaaaatggagggcaaggcattcttgtaaagcaacaaaatggaaagctagaaagtcaagtggaaatgcaatttttctcaactactgaggcagccgcaggcaatggtgataacttgactcctaaagtggtattgtacagtgaagatgtagatatagaaaccccagacactcatatttcttacatgcccactattaaggaaggtaactcacgagaactaatgggccaacaatctatgcccaacaggcctaattacattgcttttagggacaattttattggtctaatgtattacaacagcacgggtaatatgggtgttctggcgggccaagcatcgcagttgaatgctgttgtagatttgcaagacagaaacacagagctttcataccagcttttgcttgattccattggtgatagaaccaggtacttttctatgtggaatcaggctgttgacagctatgatccagatgttagaattattgaaaatcatggaactgaagatgaacttccaaattactgctttccactgggaggtgtgattaatacagagactcttaccaaggtaaaacctaaaacaggtcaggaaaatggatgggaaaaagatgctacagaattttcagataaaaatgaaataagagttggaaataattttgccatggaaatcaatctaaatgccaacctgtggagaaatttcctgtactccaacatagcgctgtatttgcccgacaagctaaagtacagtccttccaacgtaaaaatttctgataacccaaacacctacgactacatgaacaagcgagtggtggctcccgggctagtggactgctacattaaccttggagcacgctggtcccttgactatatggacaacgtcaacccatttaaccaccaccgcaatgctggcctgcgctaccgctcaatgttgctgggcaatggtcgctatgtgcccttccacatccaggtgcctcagaagttctttgccattaaaaacctccttctcctgccgggctcatacacctacgagtggaacttcaggaaggatgttaacatggttctgcagagctccctaggaaatgacctaagggttgacggagccagcattaagtttgatagcatttgcctttacgccaccttcttccccatggcccacaacaccgcctccacgcttgaggccatgcttagaaacgacaccaacgaccagtcctttaacgactatctctccgccgccaacatgctctaccctatacccgccaacgctaccaacgtgcccatatccatcccctcccgcaactgggcggctttccgcggctgggccttcacgcgccttaagactaaggaaaccccatcactgggctcgggctacgacccttattacacctactctggctctataccctacctagatggaaccttttacctcaaccacacctttaagaaggtggccattacctttgactcttctgtcagctggcctggcaatgaccgcctgcttacccccaacgagtttgaaattaagcgctcagttgacggggagggttacaacgttgcccagtgtaacatgaccaaagactggttcctggtacaaatgctagctaactataacattggctaccagggcttctatatcccagagagctacaaggaccgcatgtactccttctttagaaacttccagcccatgagccgtcaggtggtggatgatactaaatacaaggactaccaacaggtgggcatcctacaccaacacaacaactctggatttgttggctaccttgcccccaccatgcgcgaaggacaggcctaccctgctaacttcccctatccgcttataggcaagaccgcagttgacagcattacccagaaaaagtttctttgcgatcgcaccctttggcgcatcccattctccagtaactttatgtccatgggcgcactcacagacctgggccaaaaccttctctacgccaactccgcccacgcgctagacatgacttttgaggtggatcccatggacgagcccacccttctttatgttttgtttgaagtctttgacgtggtccgtgtgcaccagccgcaccgcggcgtcatcgaaaccgtgtacctgcgcacgcccttctcggccggcaacgccacaacataaagaagcaagcaacatcaacaacagctgccgccatgggctccagtgagcaggaactgaaagccattgtcaaagatcttggttgtgggccatattttttgggcacctatgacaagcgctttccaggctttgtttctccacacaagctcgcctgcgccatagtcaatacggccggtcgcgagactgggggcgtacactggatggcctttgcctggaacccgcactcaaaaacatgctacctctttgagccctttggcttttctgaccagcgactcaagcaggtttaccagtttgagtacgagtcactcctgcgccgtagcgccattgcttcttcccccgaccgctgtataacgctggaaaagtccacccaaagcgtacaggggcccaactcggccgcctgtggactattctgctgcatgtttctccacgcctttgccaactggccccaaactcccatggatcacaaccccaccatgaaccttattaccggggtacccaactccatgctcaacagtccccaggtacagcccaccctgcgtcgcaaccaggaacagctctacagcttcctggagcgccactcgccctacttccgcagccacagtgcgcagattaggagcgccacttctttttgtcacttgaaaaacatgtaaaaataatgtactagagacactttcaataaaggcaaatgcttttatttgtacactctcgggtgattatttacccccacccttgccgtctgcgccgtttaaaaatcaaaggggttctgccgcgcatcgctatgcgccactggcagggacacgttgcgatactggtgtttagtgctccacttaaactcaggcacaaccatccgcggcagctcggtgaagttttcactccacaggctgcgcaccatcaccaacgcgtttagcaggtcgggcgccgatatcttgaagtcgcagttggggcctccgccctgcgcgcgcgagttgcgatacacagggttgcagcactggaacactatcagcgccgggtggtgcacgctggccagcacgctcttgtcggagatcagatccgcgtccaggtcctccgcgttgctcagggcgaacggagtcaactttggtagctgccttcccaaaaagggcgcgtgcccaggctttgagttgcactcgcaccgtagtggcatcaaaaggtgaccgtgcccggtctgggcgttaggatacagcgcctgcataaaagccttgatctgcttaaaagccacctgagcctttgcgccttcagagaagaacatgccgcaagacttgccggaaaactgattggccggacaggccgcgtcgtgcacgcagcaccttgcgtcggtgttggagatctgcaccacatttcggccccaccggttcttcacgatcttggccttgctagactgctccttcagcgcgcgctgcccgttttcgctcgtcacatccatttcaatcacgtgctccttatttatcataatgcttccgtgtagacacttaagctcgccttcgatctcagcgcagcggtgcagccacaacgcgcagcccgtgggctcgtgatgcttgtaggtcacctctgcaaacgactgcaggtacgcctgcaggaatcgccccatcatcgtcacaaaggtcttgttgctggtgaaggtcagctgcaacccgcggtgctcctcgttcagccaggtcttgcatacggccgccagagcttccacttggtcaggcagtagtttgaagttcgcctttagatcgttatccacgtggtacttgtccatcagcgcgcgcgcagcctccatgcccttctcccacgcagacacgatcggcacactcagcgggttcatcaccgtaatttcactttccgcttcgctgggctcttcctcttcctcttgcgtccgcataccacgcgccactgggtcgtcttcattcagccgccgcactgtgcgcttacctcctttgccatgcttgattagcaccggtgggttgctgaaacccaccatttgtagcgccacatcttctctttcttcctcgctgtccacgattacctctggtgatggcgggcgctcgggcttgggagaagggcgcttctttttcttcttgggcgcaatggccaaatccgccgccgaggtcgatggccgcgggctgggtgtgcgcggcaccagcgcgtcttgtgatgagtcttcctcgtcctcggactcgatacgccgcctcatccgcttttttgggggcgcccggggaggcggcggcgacggggacggggacgacacgtcctccatggttgggggacgtcgcgccgcaccgcgtccgcgctcgggggtggtttcgcgctgctcctcttcccgactggccatttccttctcctataggcagaaaaagatcatggagtcagtcgagaagaaggacagcctaaccgccccctctgagttcgccaccaccgcctccaccgatgccgccaacgcgcctaccaccttccccgtcgaggcacccccgcttgaggaggaggaagtgattatcgagcaggacccaggttttgtaagcgaagacgacgaggaccgctcagtaccaacagaggataaaaagcaagaccaggacaacgcagaggcaaacgaggaacaagtcgggcggggggacgaaaggcatggcgactacctagatgtgggagacgacgtgctgttgaagcatctgcagcgccagtgcgccattatctgcgacgcgttgcaagagcgcagcgatgtgcccctcgccatagcggatgtcagccttgcctacgaacgccacctattctcaccgcgcgtaccccccaaacgccaagaaaacggcacatgcgagcccaacccgcgcctcaacttctaccccgtatttgccgtgccagaggtgcttgccacctatcacatctttttccaaaactgcaagatacccctatcctgccgtgccaaccgcagccgagcggacaagcagctggccttgcggcagggcgctgtcatacctgatatcgcctcgctcaacgaagtgccaaaaatctttgagggtcttggacgcgacgagaagcgcgcggcaaacgctctgcaacaggaaaacagcgaaaatgaaagtcactctggagtgttggtggaactcgagggtgacaacgcgcgcctagccgtactaaaacgcagcatcgaggtcacccactttgcctacccggcacttaacctaccccccaaggtcatgagcacagtcatgagtgagctgatcgtgcgccgtgcgcagcccctggagagggatgcaaatttgcaagaacaaacagaggagggcctacccgcagttggcgacgagcagctagcgcgctggcttcaaacgcgcgagcctgccgacttggaggagcgacgcaaactaatgatggccgcagtgctcgttaccgtggagcttgagtgcatgcagcggttctttgctgacccggagatgcagcgcaagctagaggaaacattgcactacacctttcgacagggctacgtacgccaggcctgcaagatctccaacgtggagctctgcaacctggtctcctaccttggaattttgcacgaaaaccgccttgggcaaaacgtgcttcattccacgctcaagggcgaggcgcgccgcgactacgtccgcgactgcgtttacttatttctatgctacacctggcagacggccatgggcgtttggcagcagtgcttggaggagtgcaacctcaaggagctgcagaaactgctaaagcaaaacttgaaggacctatggacggccttcaacgagcgctccgtggccgcgcacctggcggacatcattttccccgaacgcctgcttaaaaccctgcaacagggtctgccagacttcaccagtcaaagcatgttgcagaactttaggaactttatcctagagcgctcaggaatcttgcccgccacctgctgtgcacttcctagcgactttgtgcccattaagtaccgcgaatgccctccgccgctttggggccactgctaccttctgcagctagccaactaccttgcctaccactctgacataatggaagacgtgagcggtgacggtctactggagtgtcactgtcgctgcaacctatgcaccccgcaccgctccctggtttgcaattcgcagctgcttaacgaaagtcaaattatcggtacctttgagctgcagggtccctcgcctgacgaaaagtccgcggctccggggttgaaactcactccggggctgtggacgtcggcttaccttcgcaaatttgtacctgaggactaccacgcccacgagattaggttctacgaagaccaatcccgcccgcctaatgcggagcttaccgcctgcgtcattacccagggccacattcttggccaattgcaagccatcaacaaagcccgccaagagtttctgctacgaaagggacggggggtttacttggacccccagtccggcgaggagctcaacccaatccccccgccgccgcagccctatcagcagcagccgcgggcccttgcttcccaggatggcacccaaaaagaagctgcagctgccgccgccacccacggacgaggaggaatactgggacagtcaggcagaggaggttttggacgaggaggaggaggacatgatggaagactgggagagcctagacgaggaagcttccgaggtcgaagaggtgtcagacgaaacaccgtcaccctcggtcgcattcccctcgccggcgccccagaaatcggcaaccggttccagcatggctacaacctccgctcctcaggcgccgccggcactgcccgttcgccgacccaaccgtagatgggacaccactggaaccagggccggtaagtccaagcagccgccgccgttagcccaagagcaacaacagcgccaaggctaccgctcatggcgcgggcacaagaacgccatagttgcttgcttgcaagactgtgggggcaacatctccttcgcccgccgctttcttctctaccatcacggcgtggccttcccccgtaacatcctgcattactaccgtcatctctacagcccatactgcaccggcggcagcggcagcaacagcagcggccacacagaagcaaaggcgaccggatagcaagactctgacaaagcccaagaaatccacagcggcggcagcagcaggaggaggagcgctgcgtctggcgcccaacgaacccgtatcgacccgcgagcttagaaacaggatttttcccactctgtatgctatatttcaacagagcaggggccaagaacaagagctgaaaataaaaaacaggtctctgcgatccctcacccgcagctgcctgtatcacaaaagcgaagatcagcttcggcgcacgctggaagacgcggaggctctcttcagtaaatactgcgcgctgactcttaaggactagtttcgcgccctttctcaaatttaagcgcgaaaactacgtcatctccagcggccacacccggcgccagcacctgttgtcagcgccattatgagcaaggaaattcccacgccctacatgtggagttaccagccacaaatgggacttgcggctggagctgcccaagactactcaacccgaataaactacatgagcgcgggaccccacatgatatcccgggtcaacggaatacgcgcccaccgaaaccgaattctcctggaacaggcggctattaccaccacacctcgtaataaccttaatccccgtagttggcccgctgccctggtgtaccaggaaagtcccgctcccaccactgtggtacttcccagagacgcccaggccgaagttcagatgactaactcaggggcgcagcttgcgggcggctttcgtcacagggtgcggtcgcccgggcagggtataactcacctgacaatcagagggcgaggtattcagctcaacgacgagtcggtgagctcctcgcttggtctccgtccggacgggacatttcagatcggcggcgccggccgctcttcattcacgcctcgtcaggcaatcctaactctgcagacctcgtcctctgagccgcgctctggaggcattggaactctgcaatttattgaggagtttgtgccatcggtctactttaaccccttctcgggacctcccggccactatccggatcaatttattcctaactttgacgcggtaaaggactcggcggacggctacgactgaatgttaagtggagaggcagagcaactgcgcctgaaacacctggtccactgtcgccgccacaagtgctttgcccgcgactccggtgagttttgctactttgaattgcccgaggatcatatcgagggcccggcgcacggcgtccggcttaccgcccagggagagcttgcccgtagcctgattcgggagtttacccagcgccccctgctagttgagcgggacaggggaccctgtgttctcactgtgatttgcaactgtcctaaccctggattacatcaagatcctctagttaatgtcaggtcgcctaagtcgattaactagagtacccggggatcttattccctttaactaataaaaaaaaataataaagcatcacttacttaaaatcagttagcaaatttctgtccagtttattcagcagcacctccttgccctcctcccagctctggtattgcagcttcctcctggctgcaaactttctccacaatctaaatggaatgtcagtttcctcctgttcctgtccatccgcacccactatcttcatgttgttgcagatgaagcgcgcaagaccgtctgaagataccttcaaccccgtgtatccatatgacacggaaaccggtcctccaactgtgccttttcttactcctccctttgtatcccccaatgggtttcaagagagtccccctggggtactctctttgcgcctatccgaacctctagttacctccaatggcatgcttgcgctcaaaatgggcaacggcctctctctggacgaggccggcaaccttacctcccaaaatgtaaccactgtgagcccacctctcaaaaaaaccaagtcaaacataaacctggaaatatctgcacccctcacagttacctcagaagccctaactgtggctgccgccgcacctctaatggtcgcgggcaacacactcaccatgcaatcacaggccccgctaaccgtgcacgactccaaacttagcattgccacccaaggacccctcacagtgtcagaaggaaagctagccctgcaaacatcaggccccctcaccaccaccgatagcagtacccttactatcactgcctcaccccctctaactactgccactggtagcttgggcattgacttgaaagagcccatttatacacaaaatggaaaactaggactaaagtacggggctcctttgcatgtaacagacgacctaaacactttgaccgtagcaactggtccaggtgtgactattaataatacttccttgcaaactaaagttactggagccttgggttttgattcacaaggcaatatgcaacttaatgtagcaggaggactaaggattgattctcaaaacagacgccttatacttgatgttagttatccgtttgatgctcaaaaccaactaaatctaagactaggacagggccctctttttataaactcagcccacaacttggatattaactacaacaaaggcctttacttgtttacagcttcaaacaattccaaaaagcttgaggttaacctaagcactgccaaggggttgatgtttgacgctacagccatagccattaatgcaggagatgggcttgaatttggttcacctaatgcaccaaacacaaatcccctcaaaacaaaaattggccatggcctagaatttgattcaaacaaggctatggttcctaaactaggaactggccttagttttgacagcacaggtgccattacagtaggaaacaaaaataatgataagctaactttgtggaccggaataaaccctccacctaactgtcaaattgtggaaaacactaatacaaatgatggcaaacttactttagtattagtaaaaaatggagggcttgttaatggctacgtgtctctagttggtgtatcagacactgtgaaccaaatgttcacacaaaagacagcaaacatccaattaagattatattttgactcttctggaaatctattaactgaggaatcagacttaaaaattccacttaaaaataaatcttctacagcgaccagtgaaactgtagccagcagcaaagcctttatgccaagtactacagcttatcccttcaacaccactactagggatagtgaaaactacattcatggaatatgttactacatgactagttatgatagaagtctatttcccttgaacatttctataatgctaaacagccgtatgatttcttccaatgttgcctatgccatacaatttgaatggaatctaaatgcaagtgaatctccagaaagcaacatagctacgctgaccacatccccctttttcttttcttacattacagaagacgacaactaaagaatcgtttgtgttatgtttcaacgtgtttatttttcaattgcagaaaatttcaagtcatttttcattcagtagtatagccccaccaccacatagcttatacagatcaccgtaccttaatcaaactcacagaaccctagtattcaacctgccacctccctcccaacacacagagtacacagtcctttctccccggctggccttaaaaagcatcatatcatgggtaacagacatattcttaggtgttatattccacacggtttcctgtcgagccaaacgctcatcagtgatattaataaactccccgggcagctcacttaagttcatgtcgctgtccagctgctgagccacaggctgctgtccaacttgcggttgcttaacgggcggcgaaggagaagtccacgcctacatgggggtagagtcataatcgtgcatcaggatagggcggtggtgctgcagcagcgcgcgaataaactgctgccgccgccgctccgtcctgcaggaatacaacatggcagtggtctcctcagcgatgattcgcaccgcccgcagcataaggcgccttgtcctccgggcacagcagcgcaccctgatctcacttaaatcagcacagtaactgcagcacagcaccacaatattgttcaaaatcccacagtgcaaggcgctgtatccaaagctcatggcggggaccacagaacccacgtggccatcataccacaagcgcaggtagattaagtggcgacccctcataaacacgctggacataaacattacctcttttggcatgttgtaattcaccacctcccctctgattaaacatggcgccatccaccaccatcctaaaccagctggccaaaacctgcccgccggctatacactgcagggaaccgggactggaacaatgacagtggagagcccaggactcgtaaccatggatcatcatgctcgtcatgatatcaatgttggcacaacacaggcacacgtgcatacacttcctcaggattacaagctcctcccgcgttagaaccatatcccagggaacaacccattcctgaatcagcgtaaatcccacactgcagggaagacctcgcacgtaactcacgttgtgcattgtcaaagtgttacattcgggcagcagcggatgatcctccagtatggtagcgcgggtttctgtctcaaaaggaggtagacgatccctactgtacggagtgcgccgagacaaccgagatcgtgttggtcgtagtgtcatgccaaatggaacgccggacgtagtcatatttcctgaagcaaaaccaggtgcgggcgtgacaaacagatctgcgtctccggtctcgccgcttagatcgctctgtgtagtagttgtagtatatccactctctcaaagcatccaggcgccccctggcttcgggttctatgtaaactccttcatgcgccgctgccctgataacatccaccaccgcagaataagccacacccagccaacctacacattcgttctgcgagtcacacacgggaggagcgggaagagctggaagaaccatgtttttttttttattccaaaagattatccaaaacctcaaaatgaagatctattaagtgaacgcgctcccctccggtggcgtggtcaaactctacagccaaagaacagataatggcatttgtaagatgttgcacaatggcttccaaaaggcaaacggccctcacgtccaagtggacgtaaaggctaaacccttcagggtgaatctcctctataaacattccagcaccttcaaccatgcccaaataattctcatctcgccaccttctcaatatatctctaagcaaatcccgaatattaagtccggccattgtaaaaatctgctccagagcgccctccaccttcagcctcaagcagcgaatcatgattgcaaaaattcaggttcctcacagacctgtataagattcaaaagcggaacattaacaaaaataccgcgatcccgtaggtcccttcgcagggccagctgaacataatcgtgcaggtctgcacggaccagcgcggccacttccccgccaggaaccatgacaaaagaacccacactgattatgacacgcatactcggagctatgctaaccagcgtagccccgatgtaagcttgttgcatgggcggcgatataaaatgcaaggtgctgctcaaaaaatcaggcaaagcctcgcgcaaaaaagaaagcacatcgtagtcatgctcatgcagataaaggcaggtaagctccggaaccaccacagaaaaagacaccatttttctctcaaacatgtctgcgggtttctgcataaacacaaaataaaataacaaaaaaacatttaaacattagaagcctgtcttacaacaggaaaaacaacccttataagcataagacggactacggccatgccggcgtgaccgtaaaaaaactggtcaccgtgattaaaaagcaccaccgacagctcctcggtcatgtccggagtcataatgtaagactcggtaaacacatcaggttgattcacatcggtcagtgctaaaaagcgaccgaaatagcccgggggaatacatacccgcaggcgtagagacaacattacagcccccataggaggtataacaaaattaataggagagaaaaacacataaacacctgaaaaaccctcctgcctaggcaaaatagcaccctcccgctccagaacaacatacagcgcttccacagcggcagccataacagtcagccttaccagtaaaaaagaaaacctattaaaaaaacaccactcgacacggcaccagctcaatcagtcacagtgtaaaaaagggccaagtgcagagcgagtatatataggactaaaaaatgacgtaacggttaaagtccacaaaaaacacccagaaaaccgcacgcgaacctacgcccagaaacgaaagccaaaaaacccacaacttcctcaaatcgtcacttccgttttcccacgttacgtcacttcccattttaagaaaactacaattcccaacacatacaagttactccgccctaaaacctacgtcacccgccccgttcccacgccccgcgccacgtcacaaactccaccccctcattatcatattggcttcaatccaaaataaggtatattattgatgatg

SEQ ID NO: 17 - DNA, 37105 bp, Artificial Sequence
  Adk35RF-E4orf6/Spike-E4dl355(E4re#12)
ttaattaacatcatcaataatataccttattttggattgaagccaatatgataatgagggggtggagtttgtgacgtggcgcggggcgtgggaacggggcgggtgacgtagtagtgtggcggaagtgtgatgttgcaagtgtggcggaacacatgtaagcgacggatgtggcaaaagtgacgtttttggtgtgcgccggtgtacacaggaagtgacaattttcgcgcggttttaggcggatgttgtagtaaatttgggcgtaaccgagtaagatttggccattttcgcgggaaaactgaataagaggaagtgaaatctgaataattttgtgttactcatagcgcgtaataatttcctcagaagccatagagcccaccgcatccccagcatgcctgctattgtcttcccaatcctcccccttgctgtcctgccccaccccaccccccagaatagaatgacacctactcagacaatgcgatgcaatttcctcattttattaggaaaggacagtgggagtggcaccttccagggtcaaggaaggcacgggggaggggcaaacaacagatggctggcaactagaaggcacagtcgaggctgatcagcgagctctagagaattgatccccaagcttctacatgggggtagagtcataatcgtgcatcaggatagggcggtggtgctgcagcagcgcgcgaataaactgctgccgccgccgctccgtcctgcaggaatacaacatggcagtggtctcctcagcgatgattcgcaccgcccgcagcataaggcgccttgtcctccgggcacagcagcgcaccctgatctcacttaaatcagcacagtaactgcagcacagcaccacaatattgttcaaaatcccacagtgcaaggcgctgtatccaaagctcatggcggggaccacagaacccacgtggccatcataccacaagcgcaggtagattaagtggcgacccctcataaacacgctggacataaacattacctcttttggcatgttgtaattcaccacctcccggtaccatataaacctctgattaaacatggcgccatccaccaccatcctaaaccagctggccaaaacctgcccgccggctatacactgcagggaaccgggactggaacaatgacagtggagagcccaggactcgtaaccatggatcatcatgctcgtcatgatatcaatgttggcacaacacaggcacacgtgcatacacttcctcaggattacaagctcctcccgcgttagaaccatatcccagggaacaacccattcctgaatcagcgtaaatcccacactgcagggaagacctcgcacgtaactcacgttgtgcattgtcaaagtgttacattcgggcagcagcggatgatcctccagtatggtagcgcgggtttctgtctcaaaaggaggtagacgatccctactgtacggagtgcgccgagacaaccgagatcgtgttggtcgtagtgtcatgccaaatggaacgccggacgtagtcatggtggccagcttggggtagttttcacgacaccttaaatggaagaaaaaaactttgaaccactgtctgaggcttgagaatgaaccaagatccaaactcaaaaagggcaaattccaaggagaattacatcaagtgccaagctggcctaacttcagtctccacccactcagtatggggaaactccatcgcataaaacccctccccccaacctaaagacgacgtactccaaaagctcgagaactaatcgaggtgcctggacggcgcccggtactccgtggagtcacatgaagcgacggctgaggacggaaaggcccttttcctttgtgtgggtgactcacccgcccgctctcccgagcgccgcgtcctccattttgagctccctgcagcagggccgggaagcggccatctttccgctcacgcaactggtgccgaccgggccagccttgccgcccagggcggggcgatacacggcggcgcgaggccaggcaccagagcaggccggccagcttgagactacccccgtccgattctcggtggccgcgctcgcaggccccgcctcgccgaacatgtgcgctgggacgcacgggccccgtcgccgcccgcggccccaaaaaccgaaataccagtgtgcagatcttggcccgcatttacaagactatcttgccagaaaaaaagcgtcgcagcaggtcatcaaaaattttaaatggctagagacttatcgaaagcagcgagacaggcgcgaaggtgccaccagattcgcacgcggcggccccagcgcccaggccaagcctcaactcaagcacgaggcgaaggggctccttaagcgcaaggcctcgaactctcccacccacttccaacccgaagctcgggatcaagaatcacgtactgcagccaggggcgtggaagtaattcaaggcacgcaagggccataacccgtaaagaggccaggcccgcgggaaccacacacggcacttacctgtgttctggcggcaaacccgttgcgaaaaagaacgttcacggcgactactgcacttatatacggttctcccccaccctcgggaaaaaggcggagccagtacacgacatcactttcccagtttaccccgcgccaccttctctaggcaccggttcaattgccgacccctccccccaacttctcggggactgtgggcgatgtgcgctctgcccactgacgggcaccggagcctgtaatagtaatcaattacggggtcattagttcatagcccatatatggagttccgcgttacataacttacggtaaatggcccgcctggctgaccgcccaacgacccccgcccattgacgtcaataatgacgtatgttcccatagtaacgccaatagggactttccattgacgtcaatgggtggagtatttacggtaaactgcccacttggcagtacatcaagtgtatcatatgccaagtacgccccctattgacgtcaatgacggtaaatggcccgcctggcattatgcccagtacatgaccttatgggactttcctacttggcagtacatctacgtattagtcatcgctattaccatggtgatgcggttttggcagtacatcaatgggcgtggatagcggtttgactcacggggatttccaagtctccaccccattgacgtcaatgggagtttgttttggcaccaaaatcaacgggactttccaaaatgtcgtaacaactccgccccattgacgcaaatgggcggtaggcgtgtacggtgggaggtctatataagcagagctctccctatcagtgatagagatctccctatcagtgatagagatcgtcgacgagctcgtttagtgaaccgtcagatcgcctggagacgccatccacgctgttttgacctccatagaagacaccgggaccgatccagcctccgatttgccaccatgtttgtgttcctggtgctgctgccactggtgtccagccagtgtgtgaacctgaccaccaggacccaacttcctcctgcctacaccaactccttcaccaggggagtctactaccctgacaaggtgttcaggtcctctgtgctgcacagcacccaggacctgttcctgccattcttcagcaatgtgacctggttccatgccatccatgtgtctggcaccaatggcaccaagaggtttgacaaccctgtgctgccattcaatgatggagtctactttgccagcacagagaagagcaacatcatcaggggctggatttttggcaccaccctggacagcaagacccagtccctgctgattgtgaacaatgccaccaatgtggtgattaaggtgtgtgagttccagttctgtaatgacccattcctgggagtctactaccacaagaacaacaagtcctggatggagtctgagttcagggtctactcctctgccaacaactgtacctttgaatatgtgagccaaccattcctgatggacttggagggcaagcagggcaacttcaagaacctgagggagtttgtgttcaagaacattgatggctacttcaagatttacagcaaacacacaccaatcaacctggtgagggacctgccacagggcttctctgccttggaaccactggtggacctgccaattggcatcaacatcaccaggttccagaccctgctggctctgcacaggtcctacctgacacctggagactcctcctctggctggacagcaggagcagcagcctactatgtgggctacctccaaccaaggaccttcctgctgaaatacaatgagaatggcaccatcacagatgctgtggactgtgccctggacccactgtctgagaccaagtgtaccctgaaatccttcacagtggagaagggcatctaccagaccagcaacttcagggtccaaccaacagagagcattgtgaggtttccaaacatcaccaacctgtgtccatttggagaggtgttcaatgccaccaggtttgcctctgtctatgcctggaacaggaagaggattagcaactgtgtggctgactactctgtgctctacaactctgcctccttcagcaccttcaagtgttatggagtgagcccaaccaaactgaatgacctgtgtttcaccaatgtctatgctgactcctttgtgattaggggagatgaggtgagacagattgcccctggacaaacaggcaagattgctgactacaactacaaactgcctgatgacttcacaggctgtgtgattgcctggaacagcaacaacctggacagcaaggtgggaggcaactacaactacctctacagactgttcaggaagagcaacctgaaaccatttgagagggacatcagcacagagatttaccaggctggcagcacaccatgtaatggagtggagggcttcaactgttactttccactccaatcctatggcttccaaccaaccaatggagtgggctaccaaccatacagggtggtggtgctgtcctttgaactgctccatgcccctgccacagtgtgtggaccaaagaagagcaccaacctggtgaagaacaagtgtgtgaacttcaacttcaatggactgacaggcacaggagtgctgacagagagcaacaagaagttcctgccattccaacagtttggcagggacattgctgacaccacagatgctgtgagggacccacagaccttggagattctggacatcacaccatgttcctttggaggagtgtctgtgattacacctggcaccaacaccagcaaccaggtggctgtgctctaccaggatgtgaactgtactgaggtgcctgtggctatccatgctgaccaacttacaccaacctggagggtctacagcacaggcagcaatgtgttccagaccagggctggctgtctgattggagcagagcatgtgaacaactcctatgagtgtgacatcccaattggagcaggcatctgtgcctcctaccagacccagaccggtggcggtgggtcgaggtctgtggcaagccagagcatcattgcctacacaatgagtctgggagcagagaactctgtggcttacagcaacaacagcattgccatcccaaccaacttcaccatctctgtgaccacagagattctgcctgtgagtatgaccaagacctctgtggactgtacaatgtatatctgtggagacagcacagagtgtagcaacctgctgctccaatatggctccttctgtacccaacttaacagggctctgacaggcattgctgtggaacaggacaagaacacccaggaggtgtttgcccaggtgaagcagatttacaagacacctccaatcaaggactttggaggcttcaacttcagccagattctgcctgacccaagcaagccaagcaagaggtccttcattgaggacctgctgttcaacaaggtgaccctggctgatgctggcttcatcaagcaatatggagactgtctgggagacattgctgccagggacctgatttgtgcccagaagttcaatggactgacagtgctgcctccactgctgacagatgagatgattgcccaatacacctctgccctgctggctggcaccatcacctctggctggacctttggagcaggagcagccctccaaatcccatttgctatgcagatggcttacaggttcaatggcattggagtgacccagaatgtgctctatgagaaccagaaactgattgccaaccagttcaactctgccattggcaagattcaggactccctgtccagcacagcctctgccctgggcaaactccaagatgtggtgaaccagaatgcccaggctctgaacaccctggtgaagcaactttccagcaactttggagccatctcctctgtgctgaatgacatcctgagcagactggacaaggtggaggctgaggtccagattgacagactgattacaggcagactccaatccctccaaacctatgtgacccaacaacttatcagggctgctgagattagggcatctgccaacctggctgccaccaagatgagtgagtgtgtgctgggacaaagcaagagggtggacttctgtggcaagggctaccacctgatgagttttccacagtctgcccctcatggagtggtgttcctgcatgtgacctatgtgcctgcccaggagaagaacttcaccacagcccctgccatctgccatgatggcaaggctcactttccaagggagggagtgtttgtgagcaatggcacccactggtttgtgacccagaggaacttctatgaaccacagattatcaccacagacaacacctttgtgtctggcaactgtgatgtggtgattggcattgtgaacaacacagtctatgacccactccaacctgaactggactccttcaaggaggaactggacaaatacttcaagaaccacaccagccctgatgtggacctgggagacatctctggcatcaatgcctctgtggtgaacatccagaaggagattgacagactgaatgaggtggctaagaacctgaatgagtccctgattgacctccaagaactgggcaaatatgaacaatacatcaagtggccatgaaaattgatcataatcagccataccacatttgtagaggttttacttgctttaaaaaacctcccacacctccccctgaacctgaaacataaaatgaatgcaattgttgttgttaacttgtttattgcagcttataatggttacaaataaagcaatagcatcacaaatttcacaaataaagcatttttttcactgcattctagttgtggtttgtccaaactcatcaatgtatcttaacgcggatcaaattgggcgtggcttaagggtgggaaagaatatataaggtgggggtcttatgtagttttgtatctgttttgcagcagccgccgccgccatgagcaccaactcgtttgatggaagcattgtgagctcatatttgacaacgcgcatgcccccatgggccggggtgcgtcagaatgtgatgggctccagcattgatggtcgccccgtcctgcccgcaaactctactaccttgacctacgagaccgtgtctggaacgccgttggagactgcagcctccgccgccgcttcagccgctgcagccaccgcccgcgggattgtgactgactttgctttcctgagcccgcttgcaagcagtgcagcttcccgttcatccgcccgcgatgacaagttgacggctcttttggcacaattggattctttgacccgggaacttaatgtcgtttctcagcagctgttggatctgcgccagcaggtttctgccctgaaggcttcctcccctcccaatgcggtttaaaacataaataaaaaaccagactctgtttggatttggatcaagcaagtgtcttgctgtctttatttaggggttttgcgcgcgcggtaggcccgggaccagcggtctcggtcgttgagggtcctgtgtattttttccaggacgtggtaaaggtgactctggatgttcagatacatgggcataagcccgtctctggggtggaggtagcaccactgcagagcttcatgctgcggggtggtgttgtagatgatccagtcgtagcaggagcgctgggcgtggtgcctaaaaatgtctttcagtagcaagctgattgccaggggcaggcccttggtgtaagtgtttacaaagcggttaagctgggatgggtgcatacgtggggatatgagatgcatcttggactgtatttttaggttggctatgttcccagccatatccctccggggattcatgttgtgcagaaccaccagcacagtgtatccggtgcacttgggaaatttgtcatgtagcttagaaggaaatgcgtggaagaacttggagacgcccttgtgacctccaagattttccatgcattcgtccataatgatggcaatgggcccacgggcggcggcctgggcgaagatatttctgggatcactaacgtcatagttgtgttccaggatgagatcgtcataggccatttttacaaagcgcgggcggagggtgccagactgcggtataatggttccatccggcccaggggcgtagttaccctcacagatttgcatttcccacgctttgagttcagatggggggatcatgtctacctgcggggcgatgaagaaaacggtttccggggtaggggagatcagctgggaagaaagcaggttcctgagcagctgcgacttaccgcagccggtgggcccgtaaatcacacctattaccgggtgcaactggtagttaagagagctgcagctgccgtcatccctgagcaggggggccacttcgttaagcatgtccctgactcgcatgttttccctgaccaaatccgccagaaggcgctcgccgcccagcgatagcagttcttgcaaggaagcaaagtttttcaacggtttgagaccgtccgccgtaggcatgcttttgagcgtttgaccaagcagttccaggcggtcccacagctcggtcacctgctctacggcatctcgatccagcatatctcctcgtttcgcgggttggggcggctttcgctgtacggcagtagtcggtgctcgtccagacgggccagggtcatgtctttccacgggcgcagggtcctcgtcagcgtagtctgggtcacggtgaaggggtgcgctccgggctgcgcgctggccagggtgcgcttgaggctggtcctgctggtgctgaagcgctgccggtcttcgccctgcgcgtcggccaggtagcatttgaccatggtgtcatagtccagcccctccgcggcgtggcccttggcgcgcagcttgcccttggaggaggcgccgcacgaggggcagtgcagacttttgagggcgtagagcttgggcgcgagaaataccgattccggggagtaggcatccgcgccgcaggccccgcagacggtctcgcattccacgagccaggtgagctctggccgttcggggtcaaaaaccaggtttcccccatgctttttgatgcgtttcttacctctggtttccatgagccggtgtccacgctcggtgacgaaaaggctgtccgtgtccccgtatacagacttgagaggcctgtcctcgagcggtgttccgcggtcctcctcgtatagaaactcggaccactctgagacaaaggctcgcgtccaggccagcacgaaggaggctaagtgggaggggtagcggtcgttgtccactagggggtccactcgctccagggtgtgaagacacatgtcgccctcttcggcatcaaggaaggtgattggtttgtaggtgtaggccacgtgaccgggtgttcctgaaggggggctataaaagggggtgggggcgcgttcgtcctcactctcttccgcatcgctgtctgcgagggccagctgttggggtgagtactccctctgaaaagcgggcatgacttctgcgctaagattgtcagtttccaaaaacgaggaggatttgatattcacctggcccgcggtgatgcctttgagggtggccgcatccatctggtcagaaaagacaatctttttgttgtcaagcttggtggcaaacgacccgtagagggcgttggacagcaacttggcgatggagcgcagggtttggtttttgtcgcgatcggcgcgctccttggccgcgatgtttagctgcacgtattcgcgcgcaacgcaccgccattcgggaaagacggtggtgcgctcgtcgggcaccaggtgcacgcgccaaccgcggttgtgcagggtgacaaggtcaacgctggtggctacctctccgcgtaggcgctcgttggtccagcagaggcggccgcccttgcgcgagcagaatggcggtagggggtctagctgcgtctcgtccggggggtctgcgtccacggtaaagaccccgggcagcaggcgcgcgtcgaagtagtctatcttgcatccttgcaagtctagcgcctgctgccatgcgcgggcggcaagcgcgcgctcgtatgggttgagtgggggaccccatggcatggggtgggtgagcgcggaggcgtacatgccgcaaatgtcgtaaacgtagaggggctctctgagtattccaagatatgtagggtagcatcttccaccgcggatgctggcgcgcacgtaatcgtatagttcgtgcgagggagcgaggaggtcgggaccgaggttgctacgggcgggctgctctgctcggaagactatctgcctgaagatggcatgtgagttggatgatatggttggacgctggaagacgttgaagctggcgtctgtgagacctaccgcgtcacgcacgaaggaggcgtaggagtcgcgcagcttgttgaccagctcggcggtgacctgcacgtctagggcgcagtagtccagggtttccttgatgatgtcatacttatcctgtcccttttttttccacagctcgcggttgaggacaaactcttcgcggtctttccagtactcttggatcggaaacccgtcggcctccgaacggtaagagcctagcatgtagaactggttgacggcctggtaggcgcagcatcccttttctacgggtagcgcgtatgcctgcgcggccttccggagcgaggtgtgggtgagcgcaaaggtgtccctgaccatgactttgaggtactggtatttgaagtcagtgtcgtcgcatccgccctgctcccagagcaaaaagtccgtgcgctttttggaacgcggatttggcagggcgaaggtgacatcgttgaagagtatctttcccgcgcgaggcataaagttgcgtgtgatgcggaagggtcccggcacctcggaacggttgttaattacctgggcggcgagcacgatctcgtcaaagccgttgatgttgtggcccacaatgtaaagttccaagaagcgcgggatgcccttgatggaaggcaattttttaagttcctcgtaggtgagctcttcaggggagctgagcccgtgctctgaaagggcccagtctgcaagatgagggttggaagcgacgaatgagctccacaggtcacgggccattagcatttgcaggtggtcgcgaaaggtcctaaactggcgacctatggccattttttctggggtgatgcagtagaaggtaagcgggtcttgttcccagcggtcccatccaaggttcgcggctaggtctcgcgcggcagtcactagaggctcatctccgccgaacttcatgaccagcatgaagggcacgagctgcttcccaaaggcccccatccaagtataggtctctacatcgtaggtgacaaagagacgctcggtgcgaggatgcgagccgatcgggaagaactggatctcccgccaccaattggaggagtggctattgatgtggtgaaagtagaagtccctgcgacgggccgaacactcgtgctggcttttgtaaaaacgtgcgcagtactggcagcggtgcacgggctgtacatcctgcacgaggttgacctgacgaccgcgcacaaggaagcagagtgggaatttgagcccctcgcctggcgggtttggctggtggtcttctacttcggctgcttgtccttgaccgtctggctgctcgaggggagttacggtggatcggaccaccacgccgcgcgagcccaaagtccagatgtccgcgcgcggcggtcggagcttgatgacaacatcgcgcagatgggagctgtccatggtctggagctcccgcggcgtcaggtcaggcgggagctcctgcaggtttacctcgcatagacgggtcagggcgcgggctagatccaggtgatacctaatttccaggggctggttggtggcggcgtcgatggcttgcaagaggccgcatccccgcggcgcgactacggtaccgcgcggcgggcggtgggccgcgggggtgtccttggatgatgcatctaaaagcggtgacgcgggcgagcccccggaggtagggggggctccggacccgccgggagagggggcaggggcacgtcggcgccgcgcgcgggcaggagctggtgctgcgcgcgtaggttgctggcgaacgcgacgacgcggcggttgatctcctgaatctggcgcctctgcgtgaagacgacgggcccggtgagcttgaacctgaaagagagttcgacagaatcaatttcggtgtcgttgacggcggcctggcgcaaaatctcctgcacgtctcctgagttgtcttgataggcgatctcggccatgaactgctcgatctcttcctcctggagatctccgcgtccggctcgctccacggtggcggcgaggtcgttggaaatgcgggccatgagctgcgagaaggcgttgaggcctccctcgttccagacgcggctgtagaccacgcccccttcggcatcgcgggcgcgcatgaccacctgcgcgagattgagctccacgtgccgggcgaagacggcgtagtttcgcaggcgctgaaagaggtagttgagggtggtggcggtgtgttctgccacgaagaagtacataacccagcgtcgcaacgtggattcgttgatatcccccaaggcctcaaggcgctccatggcctcgtagaagtccacggcgaagttgaaaaactgggagttgcgcgccgacacggttaactcctcctccagaagacggatgagctcggcgacagtgtcgcgcacctcgcgctcaaaggctacaggggcctcttcttcttcttcaatctcctcttccataagggcctccccttcttcttcttctggcggcggtgggggaggggggacacggcggcgacgacggcgcaccgggaggcggtcgacaaagcgctcgatcatctccccgcggcgacggcgcatggtctcggtgacggcgcggccgttctcgcgggggcgcagttggaagacgccgcccgtcatgtcccggttatgggttggcggggggctgccatgcggcagggatacggcgctaacgatgcatctcaacaattgttgtgtaggtactccgccgccgagggacctgagcgagtccgcatcgaccggatcggaaaacctctcgagaaaggcgtctaaccagtcacagtcgcaaggtaggctgagcaccgtggcgggcggcagcgggcggcggtcggggttgtttctggcggaggtgctgctgatgatgtaattaaagtaggcggtcttgagacggcggatggtcgacagaagcaccatgtccttgggtccggcctgctgaatgcgcaggcggtcggccatgccccaggcttcgttttgacatcggcgcaggtctttgtagtagtcttgcatgagcctttctaccggcacttcttcttctccttcctcttgtcctgcatctcttgcatctatcgctgcggcggcggcggagtttggccgtaggtggcgccctcttcctcccatgcgtgtgaccccgaagcccctcatcggctgaagcagggctaggtcggcgacaacgcgctcggctaatatggcctgctgcacctgcgtgagggtagactggaagtcatccatgtccacaaagcggtggtatgcgcccgtgttgatggtgtaagtgcagttggccataacggaccagttaacggtctggtgacccggctgcgagagctcggtgtacctgagacgcgagtaagccctcgagtcaaatacgtagtcgttgcaagtccgcaccaggtactggtatcccaccaaaaagtgcggcggcggctggcggtagaggggccagcgtagggtggccggggctccgggggcgagatcttccaacataaggcgatgatatccgtagatgtacctggacatccaggtgatgccggcggcggtggtggaggcgcgcggaaagtcgcggacgcggttccagatgttgcgcagcggcaaaaagtgctccatggtcgggacgctctggccggtcaggcgcgcgcaatcgttgacgctctagcgtgcaaaaggagagcctgtaagcgggcactcttccgtggtctggtggataaattcgcaagggtatcatggcggacgaccggggttcgagccccgtatccggccgtccgccgtgatccatgcggttaccgcccgcgtgtcgaacccaggtgtgcgacgtcagacaacgggggagtgctccttttggcttccttccaggcgcggcggctgctgcgctagcttttttggccactggccgcgcgcagcgtaagcggttaggctggaaagcgaaagcattaagtggctcgctccctgtagccggagggttattttccaagggttgagtcgcgggacccccggttcgagtctcggaccggccggactgcggcgaacgggggtttgcctccccgtcatgcaagaccccgcttgcaaattcctccggaaacagggacgagccccttttttgcttttcccagatgcatccggtgctgcggcagatgcgcccccctcctcagcagcggcaagagcaagagcagcggcagacatgcagggcaccctcccctcctcctaccgcgtcaggaggggcgacatccgcggttgacgcggcagcagatggtgattacgaacccccgcggcgccgggcccggcactacctggacttggaggagggcgagggcctggcgcggctaggagcgccctctcctgagcggcacccaagggtgcagctgaagcgtgatacgcgtgaggcgtacgtgccgcggcagaacctgtttcgcgaccgcgagggagaggagcccgaggagatgcgggatcgaaagttccacgcagggcgcgagctgcggcatggcctgaatcgcgagcggttgctgcgcgaggaggactttgagcccgacgcgcgaaccgggattagtcccgcgcgcgcacacgtggcggccgccgacctggtaaccgcatacgagcagacggtgaaccaggagattaactttcaaaaaagctttaacaaccacgtgcgtacgcttgtggcgcgcgaggaggtggctataggactgatgcatctgtgggactttgtaagcgcgctggagcaaaacccaaatagcaagccgctcatggcgcagctgttccttatagtgcagcacagcagggacaacgaggcattcagggatgcgctgctaaacatagtagagcccgagggccgctggctgctcgatttgataaacatcctgcagagcatagtggtgcaggagcgcagcttgagcctggctgacaaggtggccgccatcaactattccatgcttagcctgggcaagttttacgcccgcaagatataccataccccttacgttcccatagacaaggaggtaaagatcgaggggttctacatgcgcatggcgctgaaggtgcttaccttgagcgacgacctgggcgtttatcgcaacgagcgcatccacaaggccgtgagcgtgagccggcggcgcgagctcagcgaccgcgagctgatgcacagcctgcaaagggccctggctggcacgggcagcggcgatagagaggccgagtcctactttgacgcgggcgctgacctgcgctgggccccaagccgacgcgccctggaggcagctggggccggacctgggctggcggtggcacccgcgcgcgctggcaacgtcggcggcgtggaggaatatgacgaggacgatgagtacgagccagaggacggcgagtactaagcggtgatgtttctgatcagatgatgcaagacgcaacggacccggcggtgcgggcggcgctgcagagccagccgtccggccttaactccacggacgactggcgccaggtcatggaccgcatcatgtcgctgactgcgcgcaatcctgacgcgttccggcagcagccgcaggccaaccggctctccgcaattctggaagcggtggtcccggcgcgcgcaaaccccacgcacgagaaggtgctggcgatcgtaaacgcgctggccgaaaacagggccatccggcccgacgaggccggcctggtctacgacgcgctgcttcagcgcgtggctcgttacaacagcggcaacgtgcagaccaacctggaccggctggtgggggatgtgcgcgaggccgtggcgcagcgtgagcgcgcgcagcagcagggcaacctgggctccatggttgcactaaacgccttcctgagtacacagcccgccaacgtgccgcggggacaggaggactacaccaactttgtgagcgcactgcggctaatggtgactgagacaccgcaaagtgaggtgtaccagtctgggccagactattttttccagaccagtagacaaggcctgcagaccgtaaacctgagccaggctttcaaaaacttgcaggggctgtggggggtgcgggctcccacaggcgaccgcgcgaccgtgtctagcttgctgacgcccaactcgcgcctgttgctgctgctaatagcgcccttcacggacagtggcagcgtgtcccgggacacatacctaggtcacttgctgacactgtaccgcgaggccataggtcaggcgcatgtggacgagcatactttccaggagattacaagtgtcagccgcgcgctggggcaggaggacacgggcagcctggaggcaaccctaaactacctgctgaccaaccggcggcagaagatcccctcgttgcacagtttaaacagcgaggaggagcgcattttgcgctacgtgcagcagagcgtgagccttaacctgatgcgcgacggggtaacgcccagcgtggcgctggacatgaccgcgcgcaacatggaaccgggcatgtatgcctcaaaccggccgtttatcaaccgcctaatggactacttgcatcgcgcggccgccgtgaaccccgagtatttcaccaatgccatcttgaacccgcactggctaccgccccctggtttctacaccgggggattcgaggtgcccgagggtaacgatggattcctctgggacgacatagacgacagcgtgttttccccgcaaccgcagaccctgctagagttgcaacagcgcgagcaggcagaggcggcgctgcgaaaggaaagcttccgcaggccaagcagcttgtccgatctaggcgctgcggccccgcggtcagatgctagtagcccatttccaagcttgatagggtctcttaccagcactcgcaccacccgcccgcgcctgctgggcgaggaggagtacctaaacaactcgctgctgcagccgcagcgcgaaaaaaacctgcctccggcatttcccaacaacgggatagagagcctagtggacaagatgagtagatggaagacgtacgcgcaggagcacagggacgtgccaggcccgcgcccgcccacccgtcgtcaaaggcacgaccgtcagcggggtctggtgtgggaggacgatgactcggcagacgacagcagcgtcctggatttgggagggagtggcaacccgtttgcgcaccttcgccccaggctggggagaatgttttaaaaaaaaaaaagcatgatgcaaaataaaaaactcaccaaggccatggcaccgagcgttggttttcttgtattccccttagtatgcggcgcgcggcgatgtatgaggaaggtcctcctccctcctacgagagtgtggtgagcgcggcgccagtggcggcggcgctgggttctcccttcgatgctcccctggacccgccgtttgtgcctccgcggtacctgcggcctaccggggggagaaacagcatccgttactctgagttggcacccctattcgacaccacccgtgtgtacctggtggacaacaagtcaacggatgtggcatccctgaactaccagaacgaccacagcaactttctgaccacggtcattcaaaacaatgactacagcccgggggaggcaagcacacagaccatcaatcttgacgaccggtcgcactggggcggcgacctgaaaaccatcctgcataccaacatgccaaatgtgaacgagttcatgtttaccaataagtttaaggcgcgggtgatggtgtcgcgcttgcctactaaggacaatcaggtggagctgaaatacgagtgggtggagttcacgctgcccgagggcaactactccgagaccatgaccatagaccttatgaacaacgcgatcgtggagcactacttgaaagtgggcagacagaacggggttctggaaagcgacatcggggtaaagtttgacacccgcaacttcagactggggtttgaccccgtcactggtcttgtcatgcctggggtatatacaaacgaagccttccatccagacatcattttgctgccaggatgcggggtggacttcacccacagccgcctgagcaacttgttgggcatccgcaagcggcaacccttccaggagggctttaggatcacctacgatgatctggagggtggtaacattcccgcactgttggatgtggacgcctaccaggcgagcttgaaagatgacaccgaacagggcgggggtggcgcaggcggcagcaacagcagtggcagcggcgcggaagagaactccaacgcggcagccgcggcaatgcagccggtggaggacatgaacgatcatgccattcgcggcgacacctttgccacacgggctgaggagaagcgcgctgaggccgaagcagcggccgaagctgccgcccccgctgcgcaacccgaggtcgagaagcctcagaagaaaccggtgatcaaacccctgacagaggacagcaagaaacgcagttacaacctaataagcaatgacagcaccttcacccagtaccgcagctggtaccttgcatacaactacggcgaccctcagaccggaatccgctcatggaccctgctttgcactcctgacgtaacctgcggctcggagcaggtctactggtcgttgccagacatgatgcaagaccccgtgaccttccgctccacgcgccagatcagcaactttccggtggtgggcgccgagctgttgcccgtgcactccaagagcttctacaacgaccaggccgtctactcccaactcatccgccagtttacctctctgacccacgtgttcaatcgctttcccgagaaccagattttggcgcgcccgccagcccccaccatcaccaccgtcagtgaaaacgttcctgctctcacagatcacgggacgctaccgctgcgcaacagcatcggaggagtccagcgagtgaccattactgacgccagacgccgcacctgcccctacgtttacaaggccctgggcatagtctcgccgcgcgtcctatcgagccgcactttttgagcaagcatgtccatccttatatcgcccagcaataacacaggctggggcctgcgcttcccaagcaagatgtttggcggggccaagaagcgctccgaccaacacccagtgcgcgtgcgcgggcactaccgcgcgccctggggcgcgcacaaacgcggccgcactgggcgcaccaccgtcgatgacgccatcgacgcggtggtggaggaggcgcgcaactacacgcccacgccgccaccagtgtccacagtggacgcggccattcagaccgtggtgcgcggagcccggcgctatgctaaaatgaagagacggcggaggcgcgtagcacgtcgccaccgccgccgacccggcactgccgcccaacgcgcggcggcggccctgcttaaccgcgcacgtcgcaccggccgacgggcggccatgcgggccgctcgaaggctggccgcgggtattgtcactgtgccccccaggtccaggcgacgagcggccgccgcagcagccgcggccattagtgctatgactcagggtcgcaggggcaacgtgtattgggtgcgcgactcggttagcggcctgcgcgtgcccgtgcgcacccgccccccgcgcaactagattgcaagaaaaaactacttagactcgtactgttgtatgtatccagcggcggcggcgcgcaacgaagctatgtccaagcgcaaaatcaaagaagagatgctccaggtcatcgcgccggagatctatggccccccgaagaaggaagagcaggattacaagccccgaaagctaaagcgggtcaaaaagaaaaagaaagatgatgatgatgaacttgacgacgaggtggaactgctgcacgctaccgcgcccaggcgacgggtacagtggaaaggtcgacgcgtaaaacgtgttttgcgacccggcaccaccgtagtctttacgcccggtgagcgctccacccgcacctacaagcgcgtgtatgatgaggtgtacggcgacgaggacctgcttgagcaggccaacgagcgcctcggggagtttgcctacggaaagcggcataaggacatgctggcgttgccgctggacgagggcaacccaacacctagcctaaagcccgtaacactgcagcaggtgctgcccgcgcttgcaccgtccgaagaaaagcgcggcctaaagcgcgagtctggtgacttggcacccaccgtgcagctgatggtacccaagcgccagcgactggaagatgtcttggaaaaaatgaccgtggaacctgggctggagcccgaggtccgcgtgcggccaatcaagcaggtggcgccgggactgggcgtgcagaccgtggacgttcagatacccactaccagtagcaccagtattgccaccgccacagagggcatggagacacaaacgtccccggttgcctcagcggtggcggatgccgcggtgcaggcggtcgctgcggccgcgtccaagacctctacggaggtgcaaacggacccgtggatgtttcgcgtttcagccccccggcgcccgcgccgttcgaggaagtacggcgccgccagcgcgctactgcccgaatatgccctacatccttccattgcgcctacccccggctatcgtggctacacctaccgccccagaagacgagcaactacccgacgccgaaccaccactggaacccgccgccgccgtcgccgtcgccagcccgtgctggccccgatttccgtgcgcagggtggctcgcgaaggaggcaggaccctggtgctgccaacagcgcgctaccaccccagcatcgtttaaaagccggtctttgtggttcttgcagatatggccctcacctgccgcctccgtttcccggtgccgggattccgaggaagaatgcaccgtaggaggggcatggccggccacggcctgacgggcggcatgcgtcgtgcgcaccaccggcggcggcgcgcgtcgcaccgtcgcatgcgcggcggtatcctgcccctccttattccactgatcgccgcggcgattggcgccgtgcccggaattgcatccgtggccttgcaggcgcagagacactgattaaaaacaagttgcatgtggaaaaatcaaaataaaaagtctggactctcacgctcgcttggtcctgtaactattttgtagaatggaagacatcaactttgcgtctctggccccgcgacacggctcgcgcccgttcatgggaaactggcaagatatcggcaccagcaatatgagcggtggcgccttcagctggggctcgctgtggagcggcattaaaaatttcggttccaccgttaagaactatggcagcaaggcctggaacagcagcacaggccagatgctgagggataagttgaaagagcaaaatttccaacaaaaggtggtagatggcctggcctctggcattagcggggtggtggacctggccaaccaggcagtgcaaaataagattaacagtaagcttgatccccgccctcccgtagaggagcctccaccggccgtggagacagtgtctccagaggggcgtggcgaaaagcgtccgcgccccgacagggaagaaactctggtgacgcaaatagacgagcctccctcgtacgaggaggcactaaagcaaggcctgcccaccacccgtcccatcgcgcccatggctaccggagtgctgggccagcacacacccgtaacgctggacctgcctccccccgccgacacccagcagaaacctgtgctgccaggcccgaccgccgttgttgtaacccgtcctagccgcgcgtccctgcgccgcgccgccagcggtccgcgatcgttgcggcccgtagccagtggcaactggcaaagcacactgaacagcatcgtgggtctgggggtgcaatccctgaagcgccgacgatgcttctgatagctaacgtgtcgtatgtgtgtcatgtatgcgtccatgtcgccgccagaggagctgctgagccgccgcgcgcccgctttccaagatggctaccccttcgatgatgccgcagtggtcttacatgcacatctcgggccaggacgcctcggagtacctgagccccgggctggtgcagtttgcccgcgccaccgagacgtacttcagcctgaataacaagtttagaaaccccacggtggcgcctacgcacgacgtgaccacagaccggtcccagcgtttgacgctgcggttcatccctgtggaccgtgaggatactgcgtactcgtacaaggcgcggttcaccctagctgtgggtgataaccgtgtgctggacatggcttccacgtactttgacatccgcggcgtgctggacaggggccctacttttaagccctactctggcactgcctacaacgccctggctcccaagggtgccccaaatccttgcgaatgggatgaagctgctactgctcttgaaataaacctagaagaagaggacgatgacaacgaagacgaagtagacgagcaagctgagcagcaaaaaactcacgtatttgggcaggcgccttattctggtataaatattacaaaggagggtattcaaataggtgtcgaaggtcaaacacctaaatatgccgataaaacatttcaacctgaacctcaaataggagaatctcagtggtacgaaacagaaattaatcatgcagctgggagagtcctaaaaaagactaccccaatgaaaccatgttacggttcatatgcaaaacccacaaatgaaaatggagggcaaggcattcttgtaaagcaacaaaatggaaagctagaaagtcaagtggaaatgcaatttttctcaactactgaggcagccgcaggcaatggtgataacttgactcctaaagtggtattgtacagtgaagatgtagatatagaaaccccagacactcatatttcttacatgcccactattaaggaaggtaactcacgagaactaatgggccaacaatctatgcccaacaggcctaattacattgcttttagggacaattttattggtctaatgtattacaacagcacgggtaatatgggtgttctggcgggccaagcatcgcagttgaatgctgttgtagatttgcaagacagaaacacagagctttcataccagcttttgcttgattccattggtgatagaaccaggtacttttctatgtggaatcaggctgttgacagctatgatccagatgttagaattattgaaaatcatggaactgaagatgaacttccaaattactgctttccactgggaggtgtgattaatacagagactcttaccaaggtaaaacctaaaacaggtcaggaaaatggatgggaaaaagatgctacagaattttcagataaaaatgaaataagagttggaaataattttgccatggaaatcaatctaaatgccaacctgtggagaaatttcctgtactccaacatagcgctgtatttgcccgacaagctaaagtacagtccttccaacgtaaaaatttctgataacccaaacacctacgactacatgaacaagcgagtggtggctcccgggctagtggactgctacattaaccttggagcacgctggtcccttgactatatggacaacgtcaacccatttaaccaccaccgcaatgctggcctgcgctaccgctcaatgttgctgggcaatggtcgctatgtgcccttccacatccaggtgcctcagaagttctttgccattaaaaacctccttctcctgccgggctcatacacctacgagtggaacttcaggaaggatgttaacatggttctgcagagctccctaggaaatgacctaagggttgacggagccagcattaagtttgatagcatttgcctttacgccaccttcttccccatggcccacaacaccgcctccacgcttgaggccatgcttagaaacgacaccaacgaccagtcctttaacgactatctctccgccgccaacatgctctaccctatacccgccaacgctaccaacgtgcccatatccatcccctcccgcaactgggcggctttccgcggctgggccttcacgcgccttaagactaaggaaaccccatcactgggctcgggctacgacccttattacacctactctggctctataccctacctagatggaaccttttacctcaaccacacctttaagaaggtggccattacctttgactcttctgtcagctggcctggcaatgaccgcctgcttacccccaacgagtttgaaattaagcgctcagttgacggggagggttacaacgttgcccagtgtaacatgaccaaagactggttcctggtacaaatgctagctaactataacattggctaccagggcttctatatcccagagagctacaaggaccgcatgtactccttctttagaaacttccagcccatgagccgtcaggtggtggatgatactaaatacaaggactaccaacaggtgggcatcctacaccaacacaacaactctggatttgttggctaccttgcccccaccatgcgcgaaggacaggcctaccctgctaacttcccctatccgcttataggcaagaccgcagttgacagcattacccagaaaaagtttctttgcgatcgcaccctttggcgcatcccattctccagtaactttatgtccatgggcgcactcacagacctgggccaaaaccttctctacgccaactccgcccacgcgctagacatgacttttgaggtggatcccatggacgagcccacccttctttatgttttgtttgaagtctttgacgtggtccgtgtgcaccagccgcaccgcggcgtcatcgaaaccgtgtacctgcgcacgcccttctcggccggcaacgccacaacataaagaagcaagcaacatcaacaacagctgccgccatgggctccagtgagcaggaactgaaagccattgtcaaagatcttggttgtgggccatattttttgggcacctatgacaagcgctttccaggctttgtttctccacacaagctcgcctgcgccatagtcaatacggccggtcgcgagactgggggcgtacactggatggcctttgcctggaacccgcactcaaaaacatgctacctctttgagccctttggcttttctgaccagcgactcaagcaggtttaccagtttgagtacgagtcactcctgcgccgtagcgccattgcttcttcccccgaccgctgtataacgctggaaaagtccacccaaagcgtacaggggcccaactcggccgcctgtggactattctgctgcatgtttctccacgcctttgccaactggccccaaactcccatggatcacaaccccaccatgaaccttattaccggggtacccaactccatgctcaacagtccccaggtacagcccaccctgcgtcgcaaccaggaacagctctacagcttcctggagcgccactcgccctacttccgcagccacagtgcgcagattaggagcgccacttctttttgtcacttgaaaaacatgtaaaaataatgtactagagacactttcaataaaggcaaatgcttttatttgtacactctcgggtgattatttacccccacccttgccgtctgcgccgtttaaaaatcaaaggggttctgccgcgcatcgctatgcgccactggcagggacacgttgcgatactggtgtttagtgctccacttaaactcaggcacaaccatccgcggcagctcggtgaagttttcactccacaggctgcgcaccatcaccaacgcgtttagcaggtcgggcgccgatatcttgaagtcgcagttggggcctccgccctgcgcgcgcgagttgcgatacacagggttgcagcactggaacactatcagcgccgggtggtgcacgctggccagcacgctcttgtcggagatcagatccgcgtccaggtcctccgcgttgctcagggcgaacggagtcaactttggtagctgccttcccaaaaagggcgcgtgcccaggctttgagttgcactcgcaccgtagtggcatcaaaaggtgaccgtgcccggtctgggcgttaggatacagcgcctgcataaaagccttgatctgcttaaaagccacctgagcctttgcgccttcagagaagaacatgccgcaagacttgccggaaaactgattggccggacaggccgcgtcgtgcacgcagcaccttgcgtcggtgttggagatctgcaccacatttcggccccaccggttcttcacgatcttggccttgctagactgctccttcagcgcgcgctgcccgttttcgctcgtcacatccatttcaatcacgtgctccttatttatcataatgcttccgtgtagacacttaagctcgccttcgatctcagcgcagcggtgcagccacaacgcgcagcccgtgggctcgtgatgcttgtaggtcacctctgcaaacgactgcaggtacgcctgcaggaatcgccccatcatcgtcacaaaggtcttgttgctggtgaaggtcagctgcaacccgcggtgctcctcgttcagccaggtcttgcatacggccgccagagcttccacttggtcaggcagtagtttgaagttcgcctttagatcgttatccacgtggtacttgtccatcagcgcgcgcgcagcctccatgcccttctcccacgcagacacgatcggcacactcagcgggttcatcaccgtaatttcactttccgcttcgctgggctcttcctcttcctcttgcgtccgcataccacgcgccactgggtcgtcttcattcagccgccgcactgtgcgcttacctcctttgccatgcttgattagcaccggtgggttgctgaaacccaccatttgtagcgccacatcttctctttcttcctcgctgtccacgattacctctggtgatggcgggcgctcgggcttgggagaagggcgcttctttttcttcttgggcgcaatggccaaatccgccgccgaggtcgatggccgcgggctgggtgtgcgcggcaccagcgcgtcttgtgatgagtcttcctcgtcctcggactcgatacgccgcctcatccgcttttttgggggcgcccggggaggcggcggcgacggggacggggacgacacgtcctccatggttgggggacgtcgcgccgcaccgcgtccgcgctcgggggtggtttcgcgctgctcctcttcccgactggccatttccttctcctataggcagaaaaagatcatggagtcagtcgagaagaaggacagcctaaccgccccctctgagttcgccaccaccgcctccaccgatgccgccaacgcgcctaccaccttccccgtcgaggcacccccgcttgaggaggaggaagtgattatcgagcaggacccaggttttgtaagcgaagacgacgaggaccgctcagtaccaacagaggataaaaagcaagaccaggacaacgcagaggcaaacgaggaacaagtcgggcggggggacgaaaggcatggcgactacctagatgtgggagacgacgtgctgttgaagcatctgcagcgccagtgcgccattatctgcgacgcgttgcaagagcgcagcgatgtgcccctcgccatagcggatgtcagccttgcctacgaacgccacctattctcaccgcgcgtaccccccaaacgccaagaaaacggcacatgcgagcccaacccgcgcctcaacttctaccccgtatttgccgtgccagaggtgcttgccacctatcacatctttttccaaaactgcaagatacccctatcctgccgtgccaaccgcagccgagcggacaagcagctggccttgcggcagggcgctgtcatacctgatatcgcctcgctcaacgaagtgccaaaaatctttgagggtcttggacgcgacgagaagcgcgcggcaaacgctctgcaacaggaaaacagcgaaaatgaaagtcactctggagtgttggtggaactcgagggtgacaacgcgcgcctagccgtactaaaacgcagcatcgaggtcacccactttgcctacccggcacttaacctaccccccaaggtcatgagcacagtcatgagtgagctgatcgtgcgccgtgcgcagcccctggagagggatgcaaatttgcaagaacaaacagaggagggcctacccgcagttggcgacgagcagctagcgcgctggcttcaaacgcgcgagcctgccgacttggaggagcgacgcaaactaatgatggccgcagtgctcgttaccgtggagcttgagtgcatgcagcggttctttgctgacccggagatgcagcgcaagctagaggaaacattgcactacacctttcgacagggctacgtacgccaggcctgcaagatctccaacgtggagctctgcaacctggtctcctaccttggaattttgcacgaaaaccgccttgggcaaaacgtgcttcattccacgctcaagggcgaggcgcgccgcgactacgtccgcgactgcgtttacttatttctatgctacacctggcagacggccatgggcgtttggcagcagtgcttggaggagtgcaacctcaaggagctgcagaaactgctaaagcaaaacttgaaggacctatggacggccttcaacgagcgctccgtggccgcgcacctggcggacatcattttccccgaacgcctgcttaaaaccctgcaacagggtctgccagacttcaccagtcaaagcatgttgcagaactttaggaactttatcctagagcgctcaggaatcttgcccgccacctgctgtgcacttcctagcgactttgtgcccattaagtaccgcgaatgccctccgccgctttggggccactgctaccttctgcagctagccaactaccttgcctaccactctgacataatggaagacgtgagcggtgacggtctactggagtgtcactgtcgctgcaacctatgcaccccgcaccgctccctggtttgcaattcgcagctgcttaacgaaagtcaaattatcggtacctttgagctgcagggtccctcgcctgacgaaaagtccgcggctccggggttgaaactcactccggggctgtggacgtcggcttaccttcgcaaatttgtacctgaggactaccacgcccacgagattaggttctacgaagaccaatcccgcccgcctaatgcggagcttaccgcctgcgtcattacccagggccacattcttggccaattgcaagccatcaacaaagcccgccaagagtttctgctacgaaagggacggggggtttacttggacccccagtccggcgaggagctcaacccaatccccccgccgccgcagccctatcagcagcagccgcgggcccttgcttcccaggatggcacccaaaaagaagctgcagctgccgccgccacccacggacgaggaggaatactgggacagtcaggcagaggaggttttggacgaggaggaggaggacatgatggaagactgggagagcctagacgaggaagcttccgaggtcgaagaggtgtcagacgaaacaccgtcaccctcggtcgcattcccctcgccggcgccccagaaatcggcaaccggttccagcatggctacaacctccgctcctcaggcgccgccggcactgcccgttcgccgacccaaccgtagatgggacaccactggaaccagggccggtaagtccaagcagccgccgccgttagcccaagagcaacaacagcgccaaggctaccgctcatggcgcgggcacaagaacgccatagttgcttgcttgcaagactgtgggggcaacatctccttcgcccgccgctttcttctctaccatcacggcgtggccttcccccgtaacatcctgcattactaccgtcatctctacagcccatactgcaccggcggcagcggcagcaacagcagcggccacacagaagcaaaggcgaccggatagcaagactctgacaaagcccaagaaatccacagcggcggcagcagcaggaggaggagcgctgcgtctggcgcccaacgaacccgtatcgacccgcgagcttagaaacaggatttttcccactctgtatgctatatttcaacagagcaggggccaagaacaagagctgaaaataaaaaacaggtctctgcgatccctcacccgcagctgcctgtatcacaaaagcgaagatcagcttcggcgcacgctggaagacgcggaggctctcttcagtaaatactgcgcgctgactcttaaggactagtttcgcgccctttctcaaatttaagcgcgaaaactacgtcatctccagcggccacacccggcgccagcacctgttgtcagcgccattatgagcaaggaaattcccacgccctacatgtggagttaccagccacaaatgggacttgcggctggagctgcccaagactactcaacccgaataaactacatgagcgcgggaccccacatgatatcccgggtcaacggaatacgcgcccaccgaaaccgaattctcctggaacaggcggctattaccaccacacctcgtaataaccttaatccccgtagttggcccgctgccctggtgtaccaggaaagtcccgctcccaccactgtggtacttcccagagacgcccaggccgaagttcagatgactaactcaggggcgcagcttgcgggcggctttcgtcacagggtgcggtcgcccgggcagggtataactcacctgacaatcagagggcgaggtattcagctcaacgacgagtcggtgagctcctcgcttggtctccgtccggacgggacatttcagatcggcggcgccggccgctcttcattcacgcctcgtcaggcaatcctaactctgcagacctcgtcctctgagccgcgctctggaggcattggaactctgcaatttattgaggagtttgtgccatcggtctactttaaccccttctcgggacctcccggccactatccggatcaatttattcctaactttgacgcggtaaaggactcggcggacggctacgactgaatgttaagtggagaggcagagcaactgcgcctgaaacacctggtccactgtcgccgccacaagtgctttgcccgcgactccggtgagttttgctactttgaattgcccgaggatcatatcgagggcccggcgcacggcgtccggcttaccgcccagggagagcttgcccgtagcctgattcgggagtttacccagcgccccctgctagttgagcgggacaggggaccctgtgttctcactgtgatttgcaactgtcctaaccctggattacatcaagatcctctagttaatgtcaggtcgcctaagtcgattaactagagtacccggggatcttattccctttaactaataaaaaaaaataataaagcatcacttacttaaaatcagttagcaaatttctgtccagtttattcagcagcacctccttgccctcctcccagctctggtattgcagcttcctcctggctgcaaactttctccacaatctaaatggaatgtcagtttcctcctgttcctgtccatccgcacccactatcttcatgttgttgcagatgaagcgcgcaagaccgtctgaagataccttcaaccccgtgtatccatatgacacggaaaccggtcctccaactgtgccttttcttactcctccctttgtatcccccaatgggtttcaagagagtccccctggggtactctctttgcgcctatccgaacctctagttacctccaatggcatgcttgcgctcaaaatgggcaacggcctctctctggacgaggccggcaaccttacctcccaaaatgtaaccactgtgagcccacctctcaaaaaaaccaagtcaaacataaacctggaaatatctgcacccctcacagttacctcagaagccctaactgtggctgccgccgcacctctaatggtcgcgggcaacacactcaccatgcaatcacaggccccgctaaccgtgcacgactccaaacttagcattgccacccaaggacccctcacagtgtcagaaggaaagctagccctgcaaacatcaggccccctcaccaccaccgatagcagtacccttactatcactgcctcaccccctctaactactgccactggtagcttgggcattgacttgaaagagcccatttatacacaaaatggaaaactaggactaaagtacggggctcctttgcatgtaacagacgacctaaacactttgaccgtagcaactggtccaggtgtgactattaataatacttccttgcaaactaaagttactggagccttgggttttgattcacaaggcaatatgcaacttaatgtagcaggaggactaaggattgattctcaaaacagacgccttatacttgatgttagttatccgtttgatgctcaaaaccaactaaatctaagactaggacagggccctctttttataaactcagcccacaacttggatattaactacaacaaaggcctttacttgtttacagcttcaaacaattccaaaaagcttgaggttaacctaagcactgccaaggggttgatgtttgacgctacagccatagccattaatgcaggagatgggcttgaatttggttcacctaatgcaccaaacacaaatcccctcaaaacaaaaattggccatggcctagaatttgattcaaacaaggctatggttcctaaactaggaactggccttagttttgacagcacaggtgccattacagtaggaaacaaaaataatgataagctaactttgtggaccggaataaaccctccacctaactgtcaaattgtggaaaacactaatacaaatgatggcaaacttactttagtattagtaaaaaatggagggcttgttaatggctacgtgtctctagttggtgtatcagacactgtgaaccaaatgttcacacaaaagacagcaaacatccaattaagattatattttgactcttctggaaatctattaactgaggaatcagacttaaaaattccacttaaaaataaatcttctacagcgaccagtgaaactgtagccagcagcaaagcctttatgccaagtactacagcttatcccttcaacaccactactagggatagtgaaaactacattcatggaatatgttactacatgactagttatgatagaagtctatttcccttgaacatttctataatgctaaacagccgtatgatttcttccaatgttgcctatgccatacaatttgaatggaatctaaatgcaagtgaatctccagaaagcaacatagctacgctgaccacatccccctttttcttttcttacattacagaagacgacaactaaagaatcgtttgtgttatgtttcaacgtgtttatttttcaattgcagaaaatttcaagtcatttttcattcagtagtatagccccaccaccacatagcttatacagatcaccgtaccttaatcaaactcacagaaccctagtattcaacctgccacctccctcccaacacacagagtacacagtcctttctccccggctggccttaaaaagcatcatatcatgggtaacagacatattcttaggtgttatattccacacggtttcctgtcgagccaaacgctcatcagtgatattaataaactccccgggcagctcacttaagttcatgtcgctgtccagctgctgagccacaggctgctgtccaacttgcggttgcttaacgggcggcgaaggagaagtccacgcctacatgggggtagagtcataatcgtgcatcaggatagggcggtggtgctgcagcagcgcgcgaataaactgctgccgccgccgctccgtcctgcaggaatacaacatggcagtggtctcctcagcgatgattcgcaccgcccgcagcataaggcgccttgtcctccgggcacagcagcgcaccctgatctcacttaaatcagcacagtaactgcagcacagcaccacaatattgttcaaaatcccacagtgcaaggcgctgtatccaaagctcatggcggggaccacagaacccacgtggccatcataccacaagcgcaggtagattaagtggcgacccctcataaacacgctggacataaacattacctcttttggcatgttgtaattcaccacctcccctctgattaaacatggcgccatccaccaccatcctaaaccagctggccaaaacctgcccgccggctatacactgcagggaaccgggactggaacaatgacagtggagagcccaggactcgtaaccatggatcatcatgctcgtcatgatatcaatgttggcacaacacaggcacacgtgcatacacttcctcaggattacaagctcctcccgcgttagaaccatatcccagggaacaacccattcctgaatcagcgtaaatcccacactgcagggaagacctcgcacgtaactcacgttgtgcattgtcaaagtgttacattcgggcagcagcggatgatcctccagtatggtagcgcgggtttctgtctcaaaaggaggtagacgatccctactgtacggagtgcgccgagacaaccgagatcgtgttggtcgtagtgtcatgccaaatggaacgccggacgtagtcatatttcctgaagcaaaaccaggtgcgggcgtgacaaacagatctgcgtctccggtctcgccgcttagatcgctctgtgtagtagttgtagtatatccactctctcaaagcatccaggcgccccctggcttcgggttctatgtaaactccttcatgcgccgctgccctgataacatccaccaccgcagaataagccacacccagccaacctacacattcgttctgcgagtcacacacgggaggagcgggaagagctggaagaaccatgtttttttttttattccaaaagattatccaaaacctcaaaatgaagatctattaagtgaacgcgctcccctccggtggcgtggtcaaactctacagccaaagaacagataatggcatttgtaagatgttgcacaatggcttccaaaaggcaaacggccctcacgtccaagtggacgtaaaggctaaacccttcagggtgaatctcctctataaacattccagcaccttcaaccatgcccaaataattctcatctcgccaccttctcaatatatctctaagcaaatcccgaatattaagtccggccattgtaaaaatctgctccagagcgccctccaccttcagcctcaagcagcgaatcatgattgcaaaaattcaggttcctcacagacctgtataagattcaaaagcggaacattaacaaaaataccgcgatcccgtaggtcccttcgcagggccagctgaacataatcgtgcaggtctgcacggaccagcgcggccacttccccgccaggaaccatgacaaaagaacccacactgattatgacacgcatactcggagctatgctaaccagcgtagccccgatgtaagcttgttgcatgggcggcgatataaaatgcaaggtgctgctcaaaaaatcaggcaaagcctcgcgcaaaaaagaaagcacatcgtagtcatgctcatgcagataaaggcaggtaagctccggaaccaccacagaaaaagacaccatttttctctcaaacatgtctgcgggtttctgcataaacacaaaataaaataacaaaaaaacatttaaacattagaagcctgtcttacaacaggaaaaacaacccttataagcataagacggactacggccatgccggcgtgaccgtaaaaaaactggtcaccgtgattaaaaagcaccaccgacagctcctcggtcatgtccggagtcataatgtaagactcggtaaacacatcaggttgattcacatcggtcagtgctaaaaagcgaccgaaatagcccgggggaatacatacccgcaggcgtagagacaacattacagcccccataggaggtataacaaaattaataggagagaaaaacacataaacacctgaaaaaccctcctgcctaggcaaaatagcaccctcccgctccagaacaacatacagcgcttccacagcggcagccataacagtcagccttaccagtaaaaaagaaaacctattaaaaaaacaccactcgacacggcaccagctcaatcagtcacagtgtaaaaaagggccaagtgcagagcgagtatatataggactaaaaaatgacgtaacggttaaagtccacaaaaaacacccagaaaaccgcacgcgaacctacgcccagaaacgaaagccaaaaaacccacaacttcctcaaatcgtcacttccgttttcccacgttacgtcacttcccattttaagaaaactacaattcccaacacatacaagttactccgccctaaaacctacgtcacccgccccgttcccacgccccgcgccacgtcacaaactccaccccctcattatcatattggcttcaatccaaaataaggtatattattgatgatg

SEQ ID NO: 18 - DNA, 36423 bp, Artificial Sequence
  pAdk35F2-Spike/E4orf6(mPGK)-E4dl355(E4re#13)
ttaattaacatcatcaataatataccttattttggattgaagccaatatgataatgagggggtggagtttgtgacgtggcgcggggcgtgggaacggggcgggtgacgtagtagtgtggcggaagtgtgatgttgcaagtgtggcggaacacatgtaagcgacggatgtggcaaaagtgacgtttttggtgtgcgccggtgtacacaggaagtgacaattttcgcgcggttttaggcggatgttgtagtaaatttgggcgtaaccgagtaagatttggccattttcgcgggaaaactgaataagaggaagtgaaatctgaataattttgtgttactcatagcgcgtaataatttctgtaatagtaatcaattacggggtcattagttcatagcccatatatggagttccgcgttacataacttacggtaaatggcccgcctggctgaccgcccaacgacccccgcccattgacgtcaataatgacgtatgttcccatagtaacgccaatagggactttccattgacgtcaatgggtggagtatttacggtaaactgcccacttggcagtacatcaagtgtatcatatgccaagtacgccccctattgacgtcaatgacggtaaatggcccgcctggcattatgcccagtacatgaccttatgggactttcctacttggcagtacatctacgtattagtcatcgctattaccatggtgatgcggttttggcagtacatcaatgggcgtggatagcggtttgactcacggggatttccaagtctccaccccattgacgtcaatgggagtttgttttggcaccaaaatcaacgggactttccaaaatgtcgtaacaactccgccccattgacgcaaatgggcggtaggcgtgtacggtgggaggtctatataagcagagctctccctatcagtgatagagatctccctatcagtgatagagatcgtcgacgagctcgtttagtgaaccgtcagatcgcctggagacgccatccacgctgttttgacctccatagaagacaccgggaccgatccagcctccgatttgccaccatgtttgtgttcctggtgctgctgccactggtgtccagccagtgtgtgaacctgaccaccaggacccaacttcctcctgcctacaccaactccttcaccaggggagtctactaccctgacaaggtgttcaggtcctctgtgctgcacagcacccaggacctgttcctgccattcttcagcaatgtgacctggttccatgccatccatgtgtctggcaccaatggcaccaagaggtttgacaaccctgtgctgccattcaatgatggagtctactttgccagcacagagaagagcaacatcatcaggggctggatttttggcaccaccctggacagcaagacccagtccctgctgattgtgaacaatgccaccaatgtggtgattaaggtgtgtgagttccagttctgtaatgacccattcctgggagtctactaccacaagaacaacaagtcctggatggagtctgagttcagggtctactcctctgccaacaactgtacctttgaatatgtgagccaaccattcctgatggacttggagggcaagcagggcaacttcaagaacctgagggagtttgtgttcaagaacattgatggctacttcaagatttacagcaaacacacaccaatcaacctggtgagggacctgccacagggcttctctgccttggaaccactggtggacctgccaattggcatcaacatcaccaggttccagaccctgctggctctgcacaggtcctacctgacacctggagactcctcctctggctggacagcaggagcagcagcctactatgtgggctacctccaaccaaggaccttcctgctgaaatacaatgagaatggcaccatcacagatgctgtggactgtgccctggacccactgtctgagaccaagtgtaccctgaaatccttcacagtggagaagggcatctaccagaccagcaacttcagggtccaaccaacagagagcattgtgaggtttccaaacatcaccaacctgtgtccatttggagaggtgttcaatgccaccaggtttgcctctgtctatgcctggaacaggaagaggattagcaactgtgtggctgactactctgtgctctacaactctgcctccttcagcaccttcaagtgttatggagtgagcccaaccaaactgaatgacctgtgtttcaccaatgtctatgctgactcctttgtgattaggggagatgaggtgagacagattgcccctggacaaacaggcaagattgctgactacaactacaaactgcctgatgacttcacaggctgtgtgattgcctggaacagcaacaacctggacagcaaggtgggaggcaactacaactacctctacagactgttcaggaagagcaacctgaaaccatttgagagggacatcagcacagagatttaccaggctggcagcacaccatgtaatggagtggagggcttcaactgttactttccactccaatcctatggcttccaaccaaccaatggagtgggctaccaaccatacagggtggtggtgctgtcctttgaactgctccatgcccctgccacagtgtgtggaccaaagaagagcaccaacctggtgaagaacaagtgtgtgaacttcaacttcaatggactgacaggcacaggagtgctgacagagagcaacaagaagttcctgccattccaacagtttggcagggacattgctgacaccacagatgctgtgagggacccacagaccttggagattctggacatcacaccatgttcctttggaggagtgtctgtgattacacctggcaccaacaccagcaaccaggtggctgtgctctaccaggatgtgaactgtactgaggtgcctgtggctatccatgctgaccaacttacaccaacctggagggtctacagcacaggcagcaatgtgttccagaccagggctggctgtctgattggagcagagcatgtgaacaactcctatgagtgtgacatcccaattggagcaggcatctgtgcctcctaccagacccagaccggtggcggtgggtcgaggtctgtggcaagccagagcatcattgcctacacaatgagtctgggagcagagaactctgtggcttacagcaacaacagcattgccatcccaaccaacttcaccatctctgtgaccacagagattctgcctgtgagtatgaccaagacctctgtggactgtacaatgtatatctgtggagacagcacagagtgtagcaacctgctgctccaatatggctccttctgtacccaacttaacagggctctgacaggcattgctgtggaacaggacaagaacacccaggaggtgtttgcccaggtgaagcagatttacaagacacctccaatcaaggactttggaggcttcaacttcagccagattctgcctgacccaagcaagccaagcaagaggtccttcattgaggacctgctgttcaacaaggtgaccctggctgatgctggcttcatcaagcaatatggagactgtctgggagacattgctgccagggacctgatttgtgcccagaagttcaatggactgacagtgctgcctccactgctgacagatgagatgattgcccaatacacctctgccctgctggctggcaccatcacctctggctggacctttggagcaggagcagccctccaaatcccatttgctatgcagatggcttacaggttcaatggcattggagtgacccagaatgtgctctatgagaaccagaaactgattgccaaccagttcaactctgccattggcaagattcaggactccctgtccagcacagcctctgccctgggcaaactccaagatgtggtgaaccagaatgcccaggctctgaacaccctggtgaagcaactttccagcaactttggagccatctcctctgtgctgaatgacatcctgagcagactggacaaggtggaggctgaggtccagattgacagactgattacaggcagactccaatccctccaaacctatgtgacccaacaacttatcagggctgctgagattagggcatctgccaacctggctgccaccaagatgagtgagtgtgtgctgggacaaagcaagagggtggacttctgtggcaagggctaccacctgatgagttttccacagtctgcccctcatggagtggtgttcctgcatgtgacctatgtgcctgcccaggagaagaacttcaccacagcccctgccatctgccatgatggcaaggctcactttccaagggagggagtgtttgtgagcaatggcacccactggtttgtgacccagaggaacttctatgaaccacagattatcaccacagacaacacctttgtgtctggcaactgtgatgtggtgattggcattgtgaacaacacagtctatgacccactccaacctgaactggactccttcaaggaggaactggacaaatacttcaagaaccacaccagccctgatgtggacctgggagacatctctggcatcaatgcctctgtggtgaacatccagaaggagattgacagactgaatgaggtggctaagaacctgaatgagtccctgattgacctccaagaactgggcaaatatgaacaatacatcaagtggccatgaaaattgatcataatcagccataccacatttgtagaggttttacttgctttaaaaaacctcccacacctccccctgaacctgaaacataaaatgaatgcaattgttgttgttaacttgtttattgcagcttataatggttacaaataaagcaatagcatcacaaatttcacaaataaagcatttttttcactgcattctagttgtggtttgtccaaactcatcaatgtatcttaacgcggatcgggtaggggaggcgcttttcccaaggcagtctggagcatgcgctttagcagccccgctgggcacttggcgctacacaagtggcctctggcctcgcacacattccacatccaccggtaggcgccaaccggctccgttctttggtggccccttcgcgccaccttctactcctcccctagtcaggaagttcccccccgccccgcagctcgcgtcgtgcaggacgtgacaaatggaagtagcacgtctcactagtctcgtgcagatggacagcaccgctgagcaatggaagcgggtaggcctttggggcagcggccaatagcagctttgctccttcgctttctgggctcagaggctgggaaggggtgggtccgggggcgggctcaggggcgggctcaggggcggggcgggcgcccgaaggtcctccggaggcccggcattctgcacgcttcaaaagcgcacgtctgccgcgctgttctcctcttcctcatctccgggcctttcgaaactaccccaagctggccaccatgactacgtccggcgttccatttggcatgacactacgaccaacacgatctcggttgtctcggcgcactccgtacagtagggatcgtctacctccttttgagacagaaacccgcgctaccatactggaggatcatccgctgctgcccgaatgtaacactttgacaatgcacaacgtgagttacgtgcgaggtcttccctgcagtgtgggatttacgctgattcaggaatgggttgttccctgggatatggttctaacgcgggaggagcttgtaatcctgaggaagtgtatgcacgtgtgcctgtgttgtgccaacattgatatcatgacgagcatgatgatccatggttacgagtcctgggctctccactgtcattgttccagtcccggttccctgcagtgtatagccggcgggcaggttttggccagctggtttaggatggtggtggatggcgccatgtttaatcagaggtttatatggtaccgggaggtggtgaattacaacatgccaaaagaggtaatgtttatgtccagcgtgtttatgaggggtcgccacttaatctacctgcgcttgtggtatgatggccacgtgggttctgtggtccccgccatgagctttggatacagcgccttgcactgtgggattttgaacaatattgtggtgctgtgctgcagttactgtgctgatttaagtgagatcagggtgcgctgctgtgcccggaggacaaggcgccttatgctgcgggcggtgcgaatcatcgctgaggagaccactgccatgttgtattcctgcaggacggagcggcggcggcagcagtttattcgcgcgctgctgcagcaccaccgccctatcctgatgcacgattatgactctacccccatgtagaagcttggggatcaattctctagagctcgctgatcagcctcgactgtgccttctagttgccagccatctgttgtttgcccctcccccgtgccttccttgaccctggaaggtgccactcccactgtcctttcctaataaaatgaggaaattgcatcgcattgtctgagtaggtgtcattctattctggggggtggggtggggcaggacagcaagggggaggattgggaagacaatagcaggcatgctggggatgcggtgggctctatggcttctgaggaaattgggcgtggcttaagggtgggaaagaatatataaggtgggggtcttatgtagttttgtatctgttttgcagcagccgccgccgccatgagcaccaactcgtttgatggaagcattgtgagctcatatttgacaacgcgcatgcccccatgggccggggtgcgtcagaatgtgatgggctccagcattgatggtcgccccgtcctgcccgcaaactctactaccttgacctacgagaccgtgtctggaacgccgttggagactgcagcctccgccgccgcttcagccgctgcagccaccgcccgcgggattgtgactgactttgctttcctgagcccgcttgcaagcagtgcagcttcccgttcatccgcccgcgatgacaagttgacggctcttttggcacaattggattctttgacccgggaacttaatgtcgtttctcagcagctgttggatctgcgccagcaggtttctgccctgaaggcttcctcccctcccaatgcggtttaaaacataaataaaaaaccagactctgtttggatttggatcaagcaagtgtcttgctgtctttatttaggggttttgcgcgcgcggtaggcccgggaccagcggtctcggtcgttgagggtcctgtgtattttttccaggacgtggtaaaggtgactctggatgttcagatacatgggcataagcccgtctctggggtggaggtagcaccactgcagagcttcatgctgcggggtggtgttgtagatgatccagtcgtagcaggagcgctgggcgtggtgcctaaaaatgtctttcagtagcaagctgattgccaggggcaggcccttggtgtaagtgtttacaaagcggttaagctgggatgggtgcatacgtggggatatgagatgcatcttggactgtatttttaggttggctatgttcccagccatatccctccggggattcatgttgtgcagaaccaccagcacagtgtatccggtgcacttgggaaatttgtcatgtagcttagaaggaaatgcgtggaagaacttggagacgcccttgtgacctccaagattttccatgcattcgtccataatgatggcaatgggcccacgggcggcggcctgggcgaagatatttctgggatcactaacgtcatagttgtgttccaggatgagatcgtcataggccatttttacaaagcgcgggcggagggtgccagactgcggtataatggttccatccggcccaggggcgtagttaccctcacagatttgcatttcccacgctttgagttcagatggggggatcatgtctacctgcggggcgatgaagaaaacggtttccggggtaggggagatcagctgggaagaaagcaggttcctgagcagctgcgacttaccgcagccggtgggcccgtaaatcacacctattaccgggtgcaactggtagttaagagagctgcagctgccgtcatccctgagcaggggggccacttcgttaagcatgtccctgactcgcatgttttccctgaccaaatccgccagaaggcgctcgccgcccagcgatagcagttcttgcaaggaagcaaagtttttcaacggtttgagaccgtccgccgtaggcatgcttttgagcgtttgaccaagcagttccaggcggtcccacagctcggtcacctgctctacggcatctcgatccagcatatctcctcgtttcgcgggttggggcggctttcgctgtacggcagtagtcggtgctcgtccagacgggccagggtcatgtctttccacgggcgcagggtcctcgtcagcgtagtctgggtcacggtgaaggggtgcgctccgggctgcgcgctggccagggtgcgcttgaggctggtcctgctggtgctgaagcgctgccggtcttcgccctgcgcgtcggccaggtagcatttgaccatggtgtcatagtccagcccctccgcggcgtggcccttggcgcgcagcttgcccttggaggaggcgccgcacgaggggcagtgcagacttttgagggcgtagagcttgggcgcgagaaataccgattccggggagtaggcatccgcgccgcaggccccgcagacggtctcgcattccacgagccaggtgagctctggccgttcggggtcaaaaaccaggtttcccccatgctttttgatgcgtttcttacctctggtttccatgagccggtgtccacgctcggtgacgaaaaggctgtccgtgtccccgtatacagacttgagaggcctgtcctcgagcggtgttccgcggtcctcctcgtatagaaactcggaccactctgagacaaaggctcgcgtccaggccagcacgaaggaggctaagtgggaggggtagcggtcgttgtccactagggggtccactcgctccagggtgtgaagacacatgtcgccctcttcggcatcaaggaaggtgattggtttgtaggtgtaggccacgtgaccgggtgttcctgaaggggggctataaaagggggtgggggcgcgttcgtcctcactctcttccgcatcgctgtctgcgagggccagctgttggggtgagtactccctctgaaaagcgggcatgacttctgcgctaagattgtcagtttccaaaaacgaggaggatttgatattcacctggcccgcggtgatgcctttgagggtggccgcatccatctggtcagaaaagacaatctttttgttgtcaagcttggtggcaaacgacccgtagagggcgttggacagcaacttggcgatggagcgcagggtttggtttttgtcgcgatcggcgcgctccttggccgcgatgtttagctgcacgtattcgcgcgcaacgcaccgccattcgggaaagacggtggtgcgctcgtcgggcaccaggtgcacgcgccaaccgcggttgtgcagggtgacaaggtcaacgctggtggctacctctccgcgtaggcgctcgttggtccagcagaggcggccgcccttgcgcgagcagaatggcggtagggggtctagctgcgtctcgtccggggggtctgcgtccacggtaaagaccccgggcagcaggcgcgcgtcgaagtagtctatcttgcatccttgcaagtctagcgcctgctgccatgcgcgggcggcaagcgcgcgctcgtatgggttgagtgggggaccccatggcatggggtgggtgagcgcggaggcgtacatgccgcaaatgtcgtaaacgtagaggggctctctgagtattccaagatatgtagggtagcatcttccaccgcggatgctggcgcgcacgtaatcgtatagttcgtgcgagggagcgaggaggtcgggaccgaggttgctacgggcgggctgctctgctcggaagactatctgcctgaagatggcatgtgagttggatgatatggttggacgctggaagacgttgaagctggcgtctgtgagacctaccgcgtcacgcacgaaggaggcgtaggagtcgcgcagcttgttgaccagctcggcggtgacctgcacgtctagggcgcagtagtccagggtttccttgatgatgtcatacttatcctgtcccttttttttccacagctcgcggttgaggacaaactcttcgcggtctttccagtactcttggatcggaaacccgtcggcctccgaacggtaagagcctagcatgtagaactggttgacggcctggtaggcgcagcatcccttttctacgggtagcgcgtatgcctgcgcggccttccggagcgaggtgtgggtgagcgcaaaggtgtccctgaccatgactttgaggtactggtatttgaagtcagtgtcgtcgcatccgccctgctcccagagcaaaaagtccgtgcgctttttggaacgcggatttggcagggcgaaggtgacatcgttgaagagtatctttcccgcgcgaggcataaagttgcgtgtgatgcggaagggtcccggcacctcggaacggttgttaattacctgggcggcgagcacgatctcgtcaaagccgttgatgttgtggcccacaatgtaaagttccaagaagcgcgggatgcccttgatggaaggcaattttttaagttcctcgtaggtgagctcttcaggggagctgagcccgtgctctgaaagggcccagtctgcaagatgagggttggaagcgacgaatgagctccacaggtcacgggccattagcatttgcaggtggtcgcgaaaggtcctaaactggcgacctatggccattttttctggggtgatgcagtagaaggtaagcgggtcttgttcccagcggtcccatccaaggttcgcggctaggtctcgcgcggcagtcactagaggctcatctccgccgaacttcatgaccagcatgaagggcacgagctgcttcccaaaggcccccatccaagtataggtctctacatcgtaggtgacaaagagacgctcggtgcgaggatgcgagccgatcgggaagaactggatctcccgccaccaattggaggagtggctattgatgtggtgaaagtagaagtccctgcgacgggccgaacactcgtgctggcttttgtaaaaacgtgcgcagtactggcagcggtgcacgggctgtacatcctgcacgaggttgacctgacgaccgcgcacaaggaagcagagtgggaatttgagcccctcgcctggcgggtttggctggtggtcttctacttcggctgcttgtccttgaccgtctggctgctcgaggggagttacggtggatcggaccaccacgccgcgcgagcccaaagtccagatgtccgcgcgcggcggtcggagcttgatgacaacatcgcgcagatgggagctgtccatggtctggagctcccgcggcgtcaggtcaggcgggagctcctgcaggtttacctcgcatagacgggtcagggcgcgggctagatccaggtgatacctaatttccaggggctggttggtggcggcgtcgatggcttgcaagaggccgcatccccgcggcgcgactacggtaccgcgcggcgggcggtgggccgcgggggtgtccttggatgatgcatctaaaagcggtgacgcgggcgagcccccggaggtagggggggctccggacccgccgggagagggggcaggggcacgtcggcgccgcgcgcgggcaggagctggtgctgcgcgcgtaggttgctggcgaacgcgacgacgcggcggttgatctcctgaatctggcgcctctgcgtgaagacgacgggcccggtgagcttgaacctgaaagagagttcgacagaatcaatttcggtgtcgttgacggcggcctggcgcaaaatctcctgcacgtctcctgagttgtcttgataggcgatctcggccatgaactgctcgatctcttcctcctggagatctccgcgtccggctcgctccacggtggcggcgaggtcgttggaaatgcgggccatgagctgcgagaaggcgttgaggcctccctcgttccagacgcggctgtagaccacgcccccttcggcatcgcgggcgcgcatgaccacctgcgcgagattgagctccacgtgccgggcgaagacggcgtagtttcgcaggcgctgaaagaggtagttgagggtggtggcggtgtgttctgccacgaagaagtacataacccagcgtcgcaacgtggattcgttgatatcccccaaggcctcaaggcgctccatggcctcgtagaagtccacggcgaagttgaaaaactgggagttgcgcgccgacacggttaactcctcctccagaagacggatgagctcggcgacagtgtcgcgcacctcgcgctcaaaggctacaggggcctcttcttcttcttcaatctcctcttccataagggcctccccttcttcttcttctggcggcggtgggggaggggggacacggcggcgacgacggcgcaccgggaggcggtcgacaaagcgctcgatcatctccccgcggcgacggcgcatggtctcggtgacggcgcggccgttctcgcgggggcgcagttggaagacgccgcccgtcatgtcccggttatgggttggcggggggctgccatgcggcagggatacggcgctaacgatgcatctcaacaattgttgtgtaggtactccgccgccgagggacctgagcgagtccgcatcgaccggatcggaaaacctctcgagaaaggcgtctaaccagtcacagtcgcaaggtaggctgagcaccgtggcgggcggcagcgggcggcggtcggggttgtttctggcggaggtgctgctgatgatgtaattaaagtaggcggtcttgagacggcggatggtcgacagaagcaccatgtccttgggtccggcctgctgaatgcgcaggcggtcggccatgccccaggcttcgttttgacatcggcgcaggtctttgtagtagtcttgcatgagcctttctaccggcacttcttcttctccttcctcttgtcctgcatctcttgcatctatcgctgcggcggcggcggagtttggccgtaggtggcgccctcttcctcccatgcgtgtgaccccgaagcccctcatcggctgaagcagggctaggtcggcgacaacgcgctcggctaatatggcctgctgcacctgcgtgagggtagactggaagtcatccatgtccacaaagcggtggtatgcgcccgtgttgatggtgtaagtgcagttggccataacggaccagttaacggtctggtgacccggctgcgagagctcggtgtacctgagacgcgagtaagccctcgagtcaaatacgtagtcgttgcaagtccgcaccaggtactggtatcccaccaaaaagtgcggcggcggctggcggtagaggggccagcgtagggtggccggggctccgggggcgagatcttccaacataaggcgatgatatccgtagatgtacctggacatccaggtgatgccggcggcggtggtggaggcgcgcggaaagtcgcggacgcggttccagatgttgcgcagcggcaaaaagtgctccatggtcgggacgctctggccggtcaggcgcgcgcaatcgttgacgctctagcgtgcaaaaggagagcctgtaagcgggcactcttccgtggtctggtggataaattcgcaagggtatcatggcggacgaccggggttcgagccccgtatccggccgtccgccgtgatccatgcggttaccgcccgcgtgtcgaacccaggtgtgcgacgtcagacaacgggggagtgctccttttggcttccttccaggcgcggcggctgctgcgctagcttttttggccactggccgcgcgcagcgtaagcggttaggctggaaagcgaaagcattaagtggctcgctccctgtagccggagggttattttccaagggttgagtcgcgggacccccggttcgagtctcggaccggccggactgcggcgaacgggggtttgcctccccgtcatgcaagaccccgcttgcaaattcctccggaaacagggacgagccccttttttgcttttcccagatgcatccggtgctgcggcagatgcgcccccctcctcagcagcggcaagagcaagagcagcggcagacatgcagggcaccctcccctcctcctaccgcgtcaggaggggcgacatccgcggttgacgcggcagcagatggtgattacgaacccccgcggcgccgggcccggcactacctggacttggaggagggcgagggcctggcgcggctaggagcgccctctcctgagcggcacccaagggtgcagctgaagcgtgatacgcgtgaggcgtacgtgccgcggcagaacctgtttcgcgaccgcgagggagaggagcccgaggagatgcgggatcgaaagttccacgcagggcgcgagctgcggcatggcctgaatcgcgagcggttgctgcgcgaggaggactttgagcccgacgcgcgaaccgggattagtcccgcgcgcgcacacgtggcggccgccgacctggtaaccgcatacgagcagacggtgaaccaggagattaactttcaaaaaagctttaacaaccacgtgcgtacgcttgtggcgcgcgaggaggtggctataggactgatgcatctgtgggactttgtaagcgcgctggagcaaaacccaaatagcaagccgctcatggcgcagctgttccttatagtgcagcacagcagggacaacgaggcattcagggatgcgctgctaaacatagtagagcccgagggccgctggctgctcgatttgataaacatcctgcagagcatagtggtgcaggagcgcagcttgagcctggctgacaaggtggccgccatcaactattccatgcttagcctgggcaagttttacgcccgcaagatataccataccccttacgttcccatagacaaggaggtaaagatcgaggggttctacatgcgcatggcgctgaaggtgcttaccttgagcgacgacctgggcgtttatcgcaacgagcgcatccacaaggccgtgagcgtgagccggcggcgcgagctcagcgaccgcgagctgatgcacagcctgcaaagggccctggctggcacgggcagcggcgatagagaggccgagtcctactttgacgcgggcgctgacctgcgctgggccccaagccgacgcgccctggaggcagctggggccggacctgggctggcggtggcacccgcgcgcgctggcaacgtcggcggcgtggaggaatatgacgaggacgatgagtacgagccagaggacggcgagtactaagcggtgatgtttctgatcagatgatgcaagacgcaacggacccggcggtgcgggcggcgctgcagagccagccgtccggccttaactccacggacgactggcgccaggtcatggaccgcatcatgtcgctgactgcgcgcaatcctgacgcgttccggcagcagccgcaggccaaccggctctccgcaattctggaagcggtggtcccggcgcgcgcaaaccccacgcacgagaaggtgctggcgatcgtaaacgcgctggccgaaaacagggccatccggcccgacgaggccggcctggtctacgacgcgctgcttcagcgcgtggctcgttacaacagcggcaacgtgcagaccaacctggaccggctggtgggggatgtgcgcgaggccgtggcgcagcgtgagcgcgcgcagcagcagggcaacctgggctccatggttgcactaaacgccttcctgagtacacagcccgccaacgtgccgcggggacaggaggactacaccaactttgtgagcgcactgcggctaatggtgactgagacaccgcaaagtgaggtgtaccagtctgggccagactattttttccagaccagtagacaaggcctgcagaccgtaaacctgagccaggctttcaaaaacttgcaggggctgtggggggtgcgggctcccacaggcgaccgcgcgaccgtgtctagcttgctgacgcccaactcgcgcctgttgctgctgctaatagcgcccttcacggacagtggcagcgtgtcccgggacacatacctaggtcacttgctgacactgtaccgcgaggccataggtcaggcgcatgtggacgagcatactttccaggagattacaagtgtcagccgcgcgctggggcaggaggacacgggcagcctggaggcaaccctaaactacctgctgaccaaccggcggcagaagatcccctcgttgcacagtttaaacagcgaggaggagcgcattttgcgctacgtgcagcagagcgtgagccttaacctgatgcgcgacggggtaacgcccagcgtggcgctggacatgaccgcgcgcaacatggaaccgggcatgtatgcctcaaaccggccgtttatcaaccgcctaatggactacttgcatcgcgcggccgccgtgaaccccgagtatttcaccaatgccatcttgaacccgcactggctaccgccccctggtttctacaccgggggattcgaggtgcccgagggtaacgatggattcctctgggacgacatagacgacagcgtgttttccccgcaaccgcagaccctgctagagttgcaacagcgcgagcaggcagaggcggcgctgcgaaaggaaagcttccgcaggccaagcagcttgtccgatctaggcgctgcggccccgcggtcagatgctagtagcccatttccaagcttgatagggtctcttaccagcactcgcaccacccgcccgcgcctgctgggcgaggaggagtacctaaacaactcgctgctgcagccgcagcgcgaaaaaaacctgcctccggcatttcccaacaacgggatagagagcctagtggacaagatgagtagatggaagacgtacgcgcaggagcacagggacgtgccaggcccgcgcccgcccacccgtcgtcaaaggcacgaccgtcagcggggtctggtgtgggaggacgatgactcggcagacgacagcagcgtcctggatttgggagggagtggcaacccgtttgcgcaccttcgccccaggctggggagaatgttttaaaaaaaaaaaagcatgatgcaaaataaaaaactcaccaaggccatggcaccgagcgttggttttcttgtattccccttagtatgcggcgcgcggcgatgtatgaggaaggtcctcctccctcctacgagagtgtggtgagcgcggcgccagtggcggcggcgctgggttctcccttcgatgctcccctggacccgccgtttgtgcctccgcggtacctgcggcctaccggggggagaaacagcatccgttactctgagttggcacccctattcgacaccacccgtgtgtacctggtggacaacaagtcaacggatgtggcatccctgaactaccagaacgaccacagcaactttctgaccacggtcattcaaaacaatgactacagcccgggggaggcaagcacacagaccatcaatcttgacgaccggtcgcactggggcggcgacctgaaaaccatcctgcataccaacatgccaaatgtgaacgagttcatgtttaccaataagtttaaggcgcgggtgatggtgtcgcgcttgcctactaaggacaatcaggtggagctgaaatacgagtgggtggagttcacgctgcccgagggcaactactccgagaccatgaccatagaccttatgaacaacgcgatcgtggagcactacttgaaagtgggcagacagaacggggttctggaaagcgacatcggggtaaagtttgacacccgcaacttcagactggggtttgaccccgtcactggtcttgtcatgcctggggtatatacaaacgaagccttccatccagacatcattttgctgccaggatgcggggtggacttcacccacagccgcctgagcaacttgttgggcatccgcaagcggcaacccttccaggagggctttaggatcacctacgatgatctggagggtggtaacattcccgcactgttggatgtggacgcctaccaggcgagcttgaaagatgacaccgaacagggcgggggtggcgcaggcggcagcaacagcagtggcagcggcgcggaagagaactccaacgcggcagccgcggcaatgcagccggtggaggacatgaacgatcatgccattcgcggcgacacctttgccacacgggctgaggagaagcgcgctgaggccgaagcagcggccgaagctgccgcccccgctgcgcaacccgaggtcgagaagcctcagaagaaaccggtgatcaaacccctgacagaggacagcaagaaacgcagttacaacctaataagcaatgacagcaccttcacccagtaccgcagctggtaccttgcatacaactacggcgaccctcagaccggaatccgctcatggaccctgctttgcactcctgacgtaacctgcggctcggagcaggtctactggtcgttgccagacatgatgcaagaccccgtgaccttccgctccacgcgccagatcagcaactttccggtggtgggcgccgagctgttgcccgtgcactccaagagcttctacaacgaccaggccgtctactcccaactcatccgccagtttacctctctgacccacgtgttcaatcgctttcccgagaaccagattttggcgcgcccgccagcccccaccatcaccaccgtcagtgaaaacgttcctgctctcacagatcacgggacgctaccgctgcgcaacagcatcggaggagtccagcgagtgaccattactgacgccagacgccgcacctgcccctacgtttacaaggccctgggcatagtctcgccgcgcgtcctatcgagccgcactttttgagcaagcatgtccatccttatatcgcccagcaataacacaggctggggcctgcgcttcccaagcaagatgtttggcggggccaagaagcgctccgaccaacacccagtgcgcgtgcgcgggcactaccgcgcgccctggggcgcgcacaaacgcggccgcactgggcgcaccaccgtcgatgacgccatcgacgcggtggtggaggaggcgcgcaactacacgcccacgccgccaccagtgtccacagtggacgcggccattcagaccgtggtgcgcggagcccggcgctatgctaaaatgaagagacggcggaggcgcgtagcacgtcgccaccgccgccgacccggcactgccgcccaacgcgcggcggcggccctgcttaaccgcgcacgtcgcaccggccgacgggcggccatgcgggccgctcgaaggctggccgcgggtattgtcactgtgccccccaggtccaggcgacgagcggccgccgcagcagccgcggccattagtgctatgactcagggtcgcaggggcaacgtgtattgggtgcgcgactcggttagcggcctgcgcgtgcccgtgcgcacccgccccccgcgcaactagattgcaagaaaaaactacttagactcgtactgttgtatgtatccagcggcggcggcgcgcaacgaagctatgtccaagcgcaaaatcaaagaagagatgctccaggtcatcgcgccggagatctatggccccccgaagaaggaagagcaggattacaagccccgaaagctaaagcgggtcaaaaagaaaaagaaagatgatgatgatgaacttgacgacgaggtggaactgctgcacgctaccgcgcccaggcgacgggtacagtggaaaggtcgacgcgtaaaacgtgttttgcgacccggcaccaccgtagtctttacgcccggtgagcgctccacccgcacctacaagcgcgtgtatgatgaggtgtacggcgacgaggacctgcttgagcaggccaacgagcgcctcggggagtttgcctacggaaagcggcataaggacatgctggcgttgccgctggacgagggcaacccaacacctagcctaaagcccgtaacactgcagcaggtgctgcccgcgcttgcaccgtccgaagaaaagcgcggcctaaagcgcgagtctggtgacttggcacccaccgtgcagctgatggtacccaagcgccagcgactggaagatgtcttggaaaaaatgaccgtggaacctgggctggagcccgaggtccgcgtgcggccaatcaagcaggtggcgccgggactgggcgtgcagaccgtggacgttcagatacccactaccagtagcaccagtattgccaccgccacagagggcatggagacacaaacgtccccggttgcctcagcggtggcggatgccgcggtgcaggcggtcgctgcggccgcgtccaagacctctacggaggtgcaaacggacccgtggatgtttcgcgtttcagccccccggcgcccgcgccgttcgaggaagtacggcgccgccagcgcgctactgcccgaatatgccctacatccttccattgcgcctacccccggctatcgtggctacacctaccgccccagaagacgagcaactacccgacgccgaaccaccactggaacccgccgccgccgtcgccgtcgccagcccgtgctggccccgatttccgtgcgcagggtggctcgcgaaggaggcaggaccctggtgctgccaacagcgcgctaccaccccagcatcgtttaaaagccggtctttgtggttcttgcagatatggccctcacctgccgcctccgtttcccggtgccgggattccgaggaagaatgcaccgtaggaggggcatggccggccacggcctgacgggcggcatgcgtcgtgcgcaccaccggcggcggcgcgcgtcgcaccgtcgcatgcgcggcggtatcctgcccctccttattccactgatcgccgcggcgattggcgccgtgcccggaattgcatccgtggccttgcaggcgcagagacactgattaaaaacaagttgcatgtggaaaaatcaaaataaaaagtctggactctcacgctcgcttggtcctgtaactattttgtagaatggaagacatcaactttgcgtctctggccccgcgacacggctcgcgcccgttcatgggaaactggcaagatatcggcaccagcaatatgagcggtggcgccttcagctggggctcgctgtggagcggcattaaaaatttcggttccaccgttaagaactatggcagcaaggcctggaacagcagcacaggccagatgctgagggataagttgaaagagcaaaatttccaacaaaaggtggtagatggcctggcctctggcattagcggggtggtggacctggccaaccaggcagtgcaaaataagattaacagtaagcttgatccccgccctcccgtagaggagcctccaccggccgtggagacagtgtctccagaggggcgtggcgaaaagcgtccgcgccccgacagggaagaaactctggtgacgcaaatagacgagcctccctcgtacgaggaggcactaaagcaaggcctgcccaccacccgtcccatcgcgcccatggctaccggagtgctgggccagcacacacccgtaacgctggacctgcctccccccgccgacacccagcagaaacctgtgctgccaggcccgaccgccgttgttgtaacccgtcctagccgcgcgtccctgcgccgcgccgccagcggtccgcgatcgttgcggcccgtagccagtggcaactggcaaagcacactgaacagcatcgtgggtctgggggtgcaatccctgaagcgccgacgatgcttctgatagctaacgtgtcgtatgtgtgtcatgtatgcgtccatgtcgccgccagaggagctgctgagccgccgcgcgcccgctttccaagatggctaccccttcgatgatgccgcagtggtcttacatgcacatctcgggccaggacgcctcggagtacctgagccccgggctggtgcagtttgcccgcgccaccgagacgtacttcagcctgaataacaagtttagaaaccccacggtggcgcctacgcacgacgtgaccacagaccggtcccagcgtttgacgctgcggttcatccctgtggaccgtgaggatactgcgtactcgtacaaggcgcggttcaccctagctgtgggtgataaccgtgtgctggacatggcttccacgtactttgacatccgcggcgtgctggacaggggccctacttttaagccctactctggcactgcctacaacgccctggctcccaagggtgccccaaatccttgcgaatgggatgaagctgctactgctcttgaaataaacctagaagaagaggacgatgacaacgaagacgaagtagacgagcaagctgagcagcaaaaaactcacgtatttgggcaggcgccttattctggtataaatattacaaaggagggtattcaaataggtgtcgaaggtcaaacacctaaatatgccgataaaacatttcaacctgaacctcaaataggagaatctcagtggtacgaaacagaaattaatcatgcagctgggagagtcctaaaaaagactaccccaatgaaaccatgttacggttcatatgcaaaacccacaaatgaaaatggagggcaaggcattcttgtaaagcaacaaaatggaaagctagaaagtcaagtggaaatgcaatttttctcaactactgaggcagccgcaggcaatggtgataacttgactcctaaagtggtattgtacagtgaagatgtagatatagaaaccccagacactcatatttcttacatgcccactattaaggaaggtaactcacgagaactaatgggccaacaatctatgcccaacaggcctaattacattgcttttagggacaattttattggtctaatgtattacaacagcacgggtaatatgggtgttctggcgggccaagcatcgcagttgaatgctgttgtagatttgcaagacagaaacacagagctttcataccagcttttgcttgattccattggtgatagaaccaggtacttttctatgtggaatcaggctgttgacagctatgatccagatgttagaattattgaaaatcatggaactgaagatgaacttccaaattactgctttccactgggaggtgtgattaatacagagactcttaccaaggtaaaacctaaaacaggtcaggaaaatggatgggaaaaagatgctacagaattttcagataaaaatgaaataagagttggaaataattttgccatggaaatcaatctaaatgccaacctgtggagaaatttcctgtactccaacatagcgctgtatttgcccgacaagctaaagtacagtccttccaacgtaaaaatttctgataacccaaacacctacgactacatgaacaagcgagtggtggctcccgggctagtggactgctacattaaccttggagcacgctggtcccttgactatatggacaacgtcaacccatttaaccaccaccgcaatgctggcctgcgctaccgctcaatgttgctgggcaatggtcgctatgtgcccttccacatccaggtgcctcagaagttctttgccattaaaaacctccttctcctgccgggctcatacacctacgagtggaacttcaggaaggatgttaacatggttctgcagagctccctaggaaatgacctaagggttgacggagccagcattaagtttgatagcatttgcctttacgccaccttcttccccatggcccacaacaccgcctccacgcttgaggccatgcttagaaacgacaccaacgaccagtcctttaacgactatctctccgccgccaacatgctctaccctatacccgccaacgctaccaacgtgcccatatccatcccctcccgcaactgggcggctttccgcggctgggccttcacgcgccttaagactaaggaaaccccatcactgggctcgggctacgacccttattacacctactctggctctataccctacctagatggaaccttttacctcaaccacacctttaagaaggtggccattacctttgactcttctgtcagctggcctggcaatgaccgcctgcttacccccaacgagtttgaaattaagcgctcagttgacggggagggttacaacgttgcccagtgtaacatgaccaaagactggttcctggtacaaatgctagctaactataacattggctaccagggcttctatatcccagagagctacaaggaccgcatgtactccttctttagaaacttccagcccatgagccgtcaggtggtggatgatactaaatacaaggactaccaacaggtgggcatcctacaccaacacaacaactctggatttgttggctaccttgcccccaccatgcgcgaaggacaggcctaccctgctaacttcccctatccgcttataggcaagaccgcagttgacagcattacccagaaaaagtttctttgcgatcgcaccctttggcgcatcccattctccagtaactttatgtccatgggcgcactcacagacctgggccaaaaccttctctacgccaactccgcccacgcgctagacatgacttttgaggtggatcccatggacgagcccacccttctttatgttttgtttgaagtctttgacgtggtccgtgtgcaccagccgcaccgcggcgtcatcgaaaccgtgtacctgcgcacgcccttctcggccggcaacgccacaacataaagaagcaagcaacatcaacaacagctgccgccatgggctccagtgagcaggaactgaaagccattgtcaaagatcttggttgtgggccatattttttgggcacctatgacaagcgctttccaggctttgtttctccacacaagctcgcctgcgccatagtcaatacggccggtcgcgagactgggggcgtacactggatggcctttgcctggaacccgcactcaaaaacatgctacctctttgagccctttggcttttctgaccagcgactcaagcaggtttaccagtttgagtacgagtcactcctgcgccgtagcgccattgcttcttcccccgaccgctgtataacgctggaaaagtccacccaaagcgtacaggggcccaactcggccgcctgtggactattctgctgcatgtttctccacgcctttgccaactggccccaaactcccatggatcacaaccccaccatgaaccttattaccggggtacccaactccatgctcaacagtccccaggtacagcccaccctgcgtcgcaaccaggaacagctctacagcttcctggagcgccactcgccctacttccgcagccacagtgcgcagattaggagcgccacttctttttgtcacttgaaaaacatgtaaaaataatgtactagagacactttcaataaaggcaaatgcttttatttgtacactctcgggtgattatttacccccacccttgccgtctgcgccgtttaaaaatcaaaggggttctgccgcgcatcgctatgcgccactggcagggacacgttgcgatactggtgtttagtgctccacttaaactcaggcacaaccatccgcggcagctcggtgaagttttcactccacaggctgcgcaccatcaccaacgcgtttagcaggtcgggcgccgatatcttgaagtcgcagttggggcctccgccctgcgcgcgcgagttgcgatacacagggttgcagcactggaacactatcagcgccgggtggtgcacgctggccagcacgctcttgtcggagatcagatccgcgtccaggtcctccgcgttgctcagggcgaacggagtcaactttggtagctgccttcccaaaaagggcgcgtgcccaggctttgagttgcactcgcaccgtagtggcatcaaaaggtgaccgtgcccggtctgggcgttaggatacagcgcctgcataaaagccttgatctgcttaaaagccacctgagcctttgcgccttcagagaagaacatgccgcaagacttgccggaaaactgattggccggacaggccgcgtcgtgcacgcagcaccttgcgtcggtgttggagatctgcaccacatttcggccccaccggttcttcacgatcttggccttgctagactgctccttcagcgcgcgctgcccgttttcgctcgtcacatccatttcaatcacgtgctccttatttatcataatgcttccgtgtagacacttaagctcgccttcgatctcagcgcagcggtgcagccacaacgcgcagcccgtgggctcgtgatgcttgtaggtcacctctgcaaacgactgcaggtacgcctgcaggaatcgccccatcatcgtcacaaaggtcttgttgctggtgaaggtcagctgcaacccgcggtgctcctcgttcagccaggtcttgcatacggccgccagagcttccacttggtcaggcagtagtttgaagttcgcctttagatcgttatccacgtggtacttgtccatcagcgcgcgcgcagcctccatgcccttctcccacgcagacacgatcggcacactcagcgggttcatcaccgtaatttcactttccgcttcgctgggctcttcctcttcctcttgcgtccgcataccacgcgccactgggtcgtcttcattcagccgccgcactgtgcgcttacctcctttgccatgcttgattagcaccggtgggttgctgaaacccaccatttgtagcgccacatcttctctttcttcctcgctgtccacgattacctctggtgatggcgggcgctcgggcttgggagaagggcgcttctttttcttcttgggcgcaatggccaaatccgccgccgaggtcgatggccgcgggctgggtgtgcgcggcaccagcgcgtcttgtgatgagtcttcctcgtcctcggactcgatacgccgcctcatccgcttttttgggggcgcccggggaggcggcggcgacggggacggggacgacacgtcctccatggttgggggacgtcgcgccgcaccgcgtccgcgctcgggggtggtttcgcgctgctcctcttcccgactggccatttccttctcctataggcagaaaaagatcatggagtcagtcgagaagaaggacagcctaaccgccccctctgagttcgccaccaccgcctccaccgatgccgccaacgcgcctaccaccttccccgtcgaggcacccccgcttgaggaggaggaagtgattatcgagcaggacccaggttttgtaagcgaagacgacgaggaccgctcagtaccaacagaggataaaaagcaagaccaggacaacgcagaggcaaacgaggaacaagtcgggcggggggacgaaaggcatggcgactacctagatgtgggagacgacgtgctgttgaagcatctgcagcgccagtgcgccattatctgcgacgcgttgcaagagcgcagcgatgtgcccctcgccatagcggatgtcagccttgcctacgaacgccacctattctcaccgcgcgtaccccccaaacgccaagaaaacggcacatgcgagcccaacccgcgcctcaacttctaccccgtatttgccgtgccagaggtgcttgccacctatcacatctttttccaaaactgcaagatacccctatcctgccgtgccaaccgcagccgagcggacaagcagctggccttgcggcagggcgctgtcatacctgatatcgcctcgctcaacgaagtgccaaaaatctttgagggtcttggacgcgacgagaagcgcgcggcaaacgctctgcaacaggaaaacagcgaaaatgaaagtcactctggagtgttggtggaactcgagggtgacaacgcgcgcctagccgtactaaaacgcagcatcgaggtcacccactttgcctacccggcacttaacctaccccccaaggtcatgagcacagtcatgagtgagctgatcgtgcgccgtgcgcagcccctggagagggatgcaaatttgcaagaacaaacagaggagggcctacccgcagttggcgacgagcagctagcgcgctggcttcaaacgcgcgagcctgccgacttggaggagcgacgcaaactaatgatggccgcagtgctcgttaccgtggagcttgagtgcatgcagcggttctttgctgacccggagatgcagcgcaagctagaggaaacattgcactacacctttcgacagggctacgtacgccaggcctgcaagatctccaacgtggagctctgcaacctggtctcctaccttggaattttgcacgaaaaccgccttgggcaaaacgtgcttcattccacgctcaagggcgaggcgcgccgcgactacgtccgcgactgcgtttacttatttctatgctacacctggcagacggccatgggcgtttggcagcagtgcttggaggagtgcaacctcaaggagctgcagaaactgctaaagcaaaacttgaaggacctatggacggccttcaacgagcgctccgtggccgcgcacctggcggacatcattttccccgaacgcctgcttaaaaccctgcaacagggtctgccagacttcaccagtcaaagcatgttgcagaactttaggaactttatcctagagcgctcaggaatcttgcccgccacctgctgtgcacttcctagcgactttgtgcccattaagtaccgcgaatgccctccgccgctttggggccactgctaccttctgcagctagccaactaccttgcctaccactctgacataatggaagacgtgagcggtgacggtctactggagtgtcactgtcgctgcaacctatgcaccccgcaccgctccctggtttgcaattcgcagctgcttaacgaaagtcaaattatcggtacctttgagctgcagggtccctcgcctgacgaaaagtccgcggctccggggttgaaactcactccggggctgtggacgtcggcttaccttcgcaaatttgtacctgaggactaccacgcccacgagattaggttctacgaagaccaatcccgcccgcctaatgcggagcttaccgcctgcgtcattacccagggccacattcttggccaattgcaagccatcaacaaagcccgccaagagtttctgctacgaaagggacggggggtttacttggacccccagtccggcgaggagctcaacccaatccccccgccgccgcagccctatcagcagcagccgcgggcccttgcttcccaggatggcacccaaaaagaagctgcagctgccgccgccacccacggacgaggaggaatactgggacagtcaggcagaggaggttttggacgaggaggaggaggacatgatggaagactgggagagcctagacgaggaagcttccgaggtcgaagaggtgtcagacgaaacaccgtcaccctcggtcgcattcccctcgccggcgccccagaaatcggcaaccggttccagcatggctacaacctccgctcctcaggcgccgccggcactgcccgttcgccgacccaaccgtagatgggacaccactggaaccagggccggtaagtccaagcagccgccgccgttagcccaagagcaacaacagcgccaaggctaccgctcatggcgcgggcacaagaacgccatagttgcttgcttgcaagactgtgggggcaacatctccttcgcccgccgctttcttctctaccatcacggcgtggccttcccccgtaacatcctgcattactaccgtcatctctacagcccatactgcaccggcggcagcggcagcaacagcagcggccacacagaagcaaaggcgaccggatagcaagactctgacaaagcccaagaaatccacagcggcggcagcagcaggaggaggagcgctgcgtctggcgcccaacgaacccgtatcgacccgcgagcttagaaacaggatttttcccactctgtatgctatatttcaacagagcaggggccaagaacaagagctgaaaataaaaaacaggtctctgcgatccctcacccgcagctgcctgtatcacaaaagcgaagatcagcttcggcgcacgctggaagacgcggaggctctcttcagtaaatactgcgcgctgactcttaaggactagtttcgcgccctttctcaaatttaagcgcgaaaactacgtcatctccagcggccacacccggcgccagcacctgttgtcagcgccattatgagcaaggaaattcccacgccctacatgtggagttaccagccacaaatgggacttgcggctggagctgcccaagactactcaacccgaataaactacatgagcgcgggaccccacatgatatcccgggtcaacggaatacgcgcccaccgaaaccgaattctcctggaacaggcggctattaccaccacacctcgtaataaccttaatccccgtagttggcccgctgccctggtgtaccaggaaagtcccgctcccaccactgtggtacttcccagagacgcccaggccgaagttcagatgactaactcaggggcgcagcttgcgggcggctttcgtcacagggtgcggtcgcccgggcagggtataactcacctgacaatcagagggcgaggtattcagctcaacgacgagtcggtgagctcctcgcttggtctccgtccggacgggacatttcagatcggcggcgccggccgctcttcattcacgcctcgtcaggcaatcctaactctgcagacctcgtcctctgagccgcgctctggaggcattggaactctgcaatttattgaggagtttgtgccatcggtctactttaaccccttctcgggacctcccggccactatccggatcaatttattcctaactttgacgcggtaaaggactcggcggacggctacgactgaatgttaagtggagaggcagagcaactgcgcctgaaacacctggtccactgtcgccgccacaagtgctttgcccgcgactccggtgagttttgctactttgaattgcccgaggatcatatcgagggcccggcgcacggcgtccggcttaccgcccagggagagcttgcccgtagcctgattcgggagtttacccagcgccccctgctagttgagcgggacaggggaccctgtgttctcactgtgatttgcaactgtcctaaccctggattacatcaagatcctctagttaatgtcaggtcgcctaagtcgattaactagagtacccggggatcttattccctttaactaataaaaaaaaataataaagcatcacttacttaaaatcagttagcaaatttctgtccagtttattcagcagcacctccttgccctcctcccagctctggtattgcagcttcctcctggctgcaaactttctccacaatctaaatggaatgtcagtttcctcctgttcctgtccatccgcacccactatcttcatgttgttgcagatgaagcgcgcaagaccgtctgaagataccttcaaccccgtgtatccatatgacacggaaaccggtcctccaactgtgccttttcttactcctccctttgtatcccccaatgggtttcaagagagtccccctggggtactctctttgcgcctatccgaacctctagttacctccaatggcatgcttgcgctcaaaatgggcaacggcctctctctggacgaggccggcaaccttacctcccaaaatgtaaccactgtgagcccacctctcaaaaaaaccaagtcaaacataaacctggaaatatctgcacccctcacagttacctcagaagccctaactgtggctgccgccgcacctctaatggtcgcgggcaacacactcaccatgcaatcacaggccccgctaaccgtgcacgactccaaacttagcattgccacccaaggacccctcacagtgtcagaaggaaagctagccctgcaaacatcaggccccctcaccaccaccgatagcagtacccttactatcactgcctcaccccctctaactactgccactggtagcttgggcattgacttgaaagagcccatttatacacaaaatggaaaactaggactaaagtacggggctcctttgcatgtaacagacgacctaaacactttgaccgtagcaactggtccaggtgtgactattaataatacttccttgcaaactaaagttactggagccttgggttttgattcacaaggcaatatgcaacttaatgtagcaggaggactaaggattgattctcaaaacagacgccttatacttgatgttagttatccgtttgatgctcaaaaccaactaaatctaagactaggacagggccctctttttataaactcagcccacaacttggatattaactacaacaaaggcctttacttgtttacagcttcaaacaattccaaaaagcttgaggttaacctaagcactgccaaggggttgatgtttgacgctacagccatagccattaatgcaggagatgggcttgaatttggttcacctaatgcaccaaacacaaatcccctcaaaacaaaaattggccatggcctagaatttgattcaaacaaggctatggttcctaaactaggaactggccttagttttgacagcacaggtgccattacagtaggaaacaaaaataatgataagctaactttgtggaccggaataaaccctccacctaactgtcaaattgtggaaaacactaatacaaatgatggcaaacttactttagtattagtaaaaaatggagggcttgttaatggctacgtgtctctagttggtgtatcagacactgtgaaccaaatgttcacacaaaagacagcaaacatccaattaagattatattttgactcttctggaaatctattaactgaggaatcagacttaaaaattccacttaaaaataaatcttctacagcgaccagtgaaactgtagccagcagcaaagcctttatgccaagtactacagcttatcccttcaacaccactactagggatagtgaaaactacattcatggaatatgttactacatgactagttatgatagaagtctatttcccttgaacatttctataatgctaaacagccgtatgatttcttccaatgttgcctatgccatacaatttgaatggaatctaaatgcaagtgaatctccagaaagcaacatagctacgctgaccacatccccctttttcttttcttacattacagaagacgacaactaaagaatcgtttgtgttatgtttcaacgtgtttatttttcaattgcagaaaatttcaagtcatttttcattcagtagtatagccccaccaccacatagcttatacagatcaccgtaccttaatcaaactcacagaaccctagtattcaacctgccacctccctcccaacacacagagtacacagtcctttctccccggctggccttaaaaagcatcatatcatgggtaacagacatattcttaggtgttatattccacacggtttcctgtcgagccaaacgctcatcagtgatattaataaactccccgggcagctcacttaagttcatgtcgctgtccagctgctgagccacaggctgctgtccaacttgcggttgcttaacgggcggcgaaggagaagtccacgcctacatgggggtagagtcataatcgtgcatcaggatagggcggtggtgctgcagcagcgcgcgaataaactgctgccgccgccgctccgtcctgcaggaatacaacatggcagtggtctcctcagcgatgattcgcaccgcccgcagcataaggcgccttgtcctccgggcacagcagcgcaccctgatctcacttaaatcagcacagtaactgcagcacagcaccacaatattgttcaaaatcccacagtgcaaggcgctgtatccaaagctcatggcggggaccacagaacccacgtggccatcataccacaagcgcaggtagattaagtggcgacccctcataaacacgctggacataaacattacctcttttggcatgttgtaattcaccacctcccctctgattaaacatggcgccatccaccaccatcctaaaccagctggccaaaacctgcccgccggctatacactgcagggaaccgggactggaacaatgacagtggagagcccaggactcgtaaccatggatcatcatgctcgtcatgatatcaatgttggcacaacacaggcacacgtgcatacacttcctcaggattacaagctcctcccgcgttagaaccatatcccagggaacaacccattcctgaatcagcgtaaatcccacactgcagggaagacctcgcacgtaactcacgttgtgcattgtcaaagtgttacattcgggcagcagcggatgatcctccagtatggtagcgcgggtttctgtctcaaaaggaggtagacgatccctactgtacggagtgcgccgagacaaccgagatcgtgttggtcgtagtgtcatgccaaatggaacgccggacgtagtcatatttcctgaagcaaaaccaggtgcgggcgtgacaaacagatctgcgtctccggtctcgccgcttagatcgctctgtgtagtagttgtagtatatccactctctcaaagcatccaggcgccccctggcttcgggttctatgtaaactccttcatgcgccgctgccctgataacatccaccaccgcagaataagccacacccagccaacctacacattcgttctgcgagtcacacacgggaggagcgggaagagctggaagaaccatgtttttttttttattccaaaagattatccaaaacctcaaaatgaagatctattaagtgaacgcgctcccctccggtggcgtggtcaaactctacagccaaagaacagataatggcatttgtaagatgttgcacaatggcttccaaaaggcaaacggccctcacgtccaagtggacgtaaaggctaaacccttcagggtgaatctcctctataaacattccagcaccttcaaccatgcccaaataattctcatctcgccaccttctcaatatatctctaagcaaatcccgaatattaagtccggccattgtaaaaatctgctccagagcgccctccaccttcagcctcaagcagcgaatcatgattgcaaaaattcaggttcctcacagacctgtataagattcaaaagcggaacattaacaaaaataccgcgatcccgtaggtcccttcgcagggccagctgaacataatcgtgcaggtctgcacggaccagcgcggccacttccccgccaggaaccatgacaaaagaacccacactgattatgacacgcatactcggagctatgctaaccagcgtagccccgatgtaagcttgttgcatgggcggcgatataaaatgcaaggtgctgctcaaaaaatcaggcaaagcctcgcgcaaaaaagaaagcacatcgtagtcatgctcatgcagataaaggcaggtaagctccggaaccaccacagaaaaagacaccatttttctctcaaacatgtctgcgggtttctgcataaacacaaaataaaataacaaaaaaacatttaaacattagaagcctgtcttacaacaggaaaaacaacccttataagcataagacggactacggccatgccggcgtgaccgtaaaaaaactggtcaccgtgattaaaaagcaccaccgacagctcctcggtcatgtccggagtcataatgtaagactcggtaaacacatcaggttgattcacatcggtcagtgctaaaaagcgaccgaaatagcccgggggaatacatacccgcaggcgtagagacaacattacagcccccataggaggtataacaaaattaataggagagaaaaacacataaacacctgaaaaaccctcctgcctaggcaaaatagcaccctcccgctccagaacaacatacagcgcttccacagcggcagccataacagtcagccttaccagtaaaaaagaaaacctattaaaaaaacaccactcgacacggcaccagctcaatcagtcacagtgtaaaaaagggccaagtgcagagcgagtatatataggactaaaaaatgacgtaacggttaaagtccacaaaaaacacccagaaaaccgcacgcgaacctacgcccagaaacgaaagccaaaaaacccacaacttcctcaaatcgtcacttccgttttcccacgttacgtcacttcccattttaagaaaactacaattcccaacacatacaagttactccgccctaaaacctacgtcacccgccccgttcccacgccccgcgccacgtcacaaactccaccccctcattatcatattggcttcaatccaaaataaggtatattattgatgatg

SEQ ID NO: 19 - DNA, 36164 bp, Artificial Sequence
  pAdk35F2-Spike/E4orf6(RSV)-E4dl355(E4re#14)
ttaattaacatcatcaataatataccttattttggattgaagccaatatgataatgagggggtggagtttgtgacgtggcgcggggcgtgggaacggggcgggtgacgtagtagtgtggcggaagtgtgatgttgcaagtgtggcggaacacatgtaagcgacggatgtggcaaaagtgacgtttttggtgtgcgccggtgtacacaggaagtgacaattttcgcgcggttttaggcggatgttgtagtaaatttgggcgtaaccgagtaagatttggccattttcgcgggaaaactgaataagaggaagtgaaatctgaataattttgtgttactcatagcgcgtaataatttctgtaatagtaatcaattacggggtcattagttcatagcccatatatggagttccgcgttacataacttacggtaaatggcccgcctggctgaccgcccaacgacccccgcccattgacgtcaataatgacgtatgttcccatagtaacgccaatagggactttccattgacgtcaatgggtggagtatttacggtaaactgcccacttggcagtacatcaagtgtatcatatgccaagtacgccccctattgacgtcaatgacggtaaatggcccgcctggcattatgcccagtacatgaccttatgggactttcctacttggcagtacatctacgtattagtcatcgctattaccatggtgatgcggttttggcagtacatcaatgggcgtggatagcggtttgactcacggggatttccaagtctccaccccattgacgtcaatgggagtttgttttggcaccaaaatcaacgggactttccaaaatgtcgtaacaactccgccccattgacgcaaatgggcggtaggcgtgtacggtgggaggtctatataagcagagctctccctatcagtgatagagatctccctatcagtgatagagatcgtcgacgagctcgtttagtgaaccgtcagatcgcctggagacgccatccacgctgttttgacctccatagaagacaccgggaccgatccagcctccgatttgccaccatgtttgtgttcctggtgctgctgccactggtgtccagccagtgtgtgaacctgaccaccaggacccaacttcctcctgcctacaccaactccttcaccaggggagtctactaccctgacaaggtgttcaggtcctctgtgctgcacagcacccaggacctgttcctgccattcttcagcaatgtgacctggttccatgccatccatgtgtctggcaccaatggcaccaagaggtttgacaaccctgtgctgccattcaatgatggagtctactttgccagcacagagaagagcaacatcatcaggggctggatttttggcaccaccctggacagcaagacccagtccctgctgattgtgaacaatgccaccaatgtggtgattaaggtgtgtgagttccagttctgtaatgacccattcctgggagtctactaccacaagaacaacaagtcctggatggagtctgagttcagggtctactcctctgccaacaactgtacctttgaatatgtgagccaaccattcctgatggacttggagggcaagcagggcaacttcaagaacctgagggagtttgtgttcaagaacattgatggctacttcaagatttacagcaaacacacaccaatcaacctggtgagggacctgccacagggcttctctgccttggaaccactggtggacctgccaattggcatcaacatcaccaggttccagaccctgctggctctgcacaggtcctacctgacacctggagactcctcctctggctggacagcaggagcagcagcctactatgtgggctacctccaaccaaggaccttcctgctgaaatacaatgagaatggcaccatcacagatgctgtggactgtgccctggacccactgtctgagaccaagtgtaccctgaaatccttcacagtggagaagggcatctaccagaccagcaacttcagggtccaaccaacagagagcattgtgaggtttccaaacatcaccaacctgtgtccatttggagaggtgttcaatgccaccaggtttgcctctgtctatgcctggaacaggaagaggattagcaactgtgtggctgactactctgtgctctacaactctgcctccttcagcaccttcaagtgttatggagtgagcccaaccaaactgaatgacctgtgtttcaccaatgtctatgctgactcctttgtgattaggggagatgaggtgagacagattgcccctggacaaacaggcaagattgctgactacaactacaaactgcctgatgacttcacaggctgtgtgattgcctggaacagcaacaacctggacagcaaggtgggaggcaactacaactacctctacagactgttcaggaagagcaacctgaaaccatttgagagggacatcagcacagagatttaccaggctggcagcacaccatgtaatggagtggagggcttcaactgttactttccactccaatcctatggcttccaaccaaccaatggagtgggctaccaaccatacagggtggtggtgctgtcctttgaactgctccatgcccctgccacagtgtgtggaccaaagaagagcaccaacctggtgaagaacaagtgtgtgaacttcaacttcaatggactgacaggcacaggagtgctgacagagagcaacaagaagttcctgccattccaacagtttggcagggacattgctgacaccacagatgctgtgagggacccacagaccttggagattctggacatcacaccatgttcctttggaggagtgtctgtgattacacctggcaccaacaccagcaaccaggtggctgtgctctaccaggatgtgaactgtactgaggtgcctgtggctatccatgctgaccaacttacaccaacctggagggtctacagcacaggcagcaatgtgttccagaccagggctggctgtctgattggagcagagcatgtgaacaactcctatgagtgtgacatcccaattggagcaggcatctgtgcctcctaccagacccagaccggtggcggtgggtcgaggtctgtggcaagccagagcatcattgcctacacaatgagtctgggagcagagaactctgtggcttacagcaacaacagcattgccatcccaaccaacttcaccatctctgtgaccacagagattctgcctgtgagtatgaccaagacctctgtggactgtacaatgtatatctgtggagacagcacagagtgtagcaacctgctgctccaatatggctccttctgtacccaacttaacagggctctgacaggcattgctgtggaacaggacaagaacacccaggaggtgtttgcccaggtgaagcagatttacaagacacctccaatcaaggactttggaggcttcaacttcagccagattctgcctgacccaagcaagccaagcaagaggtccttcattgaggacctgctgttcaacaaggtgaccctggctgatgctggcttcatcaagcaatatggagactgtctgggagacattgctgccagggacctgatttgtgcccagaagttcaatggactgacagtgctgcctccactgctgacagatgagatgattgcccaatacacctctgccctgctggctggcaccatcacctctggctggacctttggagcaggagcagccctccaaatcccatttgctatgcagatggcttacaggttcaatggcattggagtgacccagaatgtgctctatgagaaccagaaactgattgccaaccagttcaactctgccattggcaagattcaggactccctgtccagcacagcctctgccctgggcaaactccaagatgtggtgaaccagaatgcccaggctctgaacaccctggtgaagcaactttccagcaactttggagccatctcctctgtgctgaatgacatcctgagcagactggacaaggtggaggctgaggtccagattgacagactgattacaggcagactccaatccctccaaacctatgtgacccaacaacttatcagggctgctgagattagggcatctgccaacctggctgccaccaagatgagtgagtgtgtgctgggacaaagcaagagggtggacttctgtggcaagggctaccacctgatgagttttccacagtctgcccctcatggagtggtgttcctgcatgtgacctatgtgcctgcccaggagaagaacttcaccacagcccctgccatctgccatgatggcaaggctcactttccaagggagggagtgtttgtgagcaatggcacccactggtttgtgacccagaggaacttctatgaaccacagattatcaccacagacaacacctttgtgtctggcaactgtgatgtggtgattggcattgtgaacaacacagtctatgacccactccaacctgaactggactccttcaaggaggaactggacaaatacttcaagaaccacaccagccctgatgtggacctgggagacatctctggcatcaatgcctctgtggtgaacatccagaaggagattgacagactgaatgaggtggctaagaacctgaatgagtccctgattgacctccaagaactgggcaaatatgaacaatacatcaagtggccatgaaaattgatcataatcagccataccacatttgtagaggttttacttgctttaaaaaacctcccacacctccccctgaacctgaaacataaaatgaatgcaattgttgttgttaacttgtttattgcagcttataatggttacaaataaagcaatagcatcacaaatttcacaaataaagcatttttttcactgcattctagttgtggtttgtccaaactcatcaatgtatcttaacgcggatctgtagtcttatgcaatactcttgtagtcttgcaacatggtaacgatgagttagcaacatgccttacaaggagagaaaaagcaccgtgcatgccgattggtggaagtaaggtggtacgatcgtgccttattaggaaggcaacagacgggtctgacatggattggacgaaccactgaattgccgcattgcagagatattgtatttaagtgcctagctcgatacataaacaaactaccccaagctggccaccatgactacgtccggcgttccatttggcatgacactacgaccaacacgatctcggttgtctcggcgcactccgtacagtagggatcgtctacctccttttgagacagaaacccgcgctaccatactggaggatcatccgctgctgcccgaatgtaacactttgacaatgcacaacgtgagttacgtgcgaggtcttccctgcagtgtgggatttacgctgattcaggaatgggttgttccctgggatatggttctaacgcgggaggagcttgtaatcctgaggaagtgtatgcacgtgtgcctgtgttgtgccaacattgatatcatgacgagcatgatgatccatggttacgagtcctgggctctccactgtcattgttccagtcccggttccctgcagtgtatagccggcgggcaggttttggccagctggtttaggatggtggtggatggcgccatgtttaatcagaggtttatatggtaccgggaggtggtgaattacaacatgccaaaagaggtaatgtttatgtccagcgtgtttatgaggggtcgccacttaatctacctgcgcttgtggtatgatggccacgtgggttctgtggtccccgccatgagctttggatacagcgccttgcactgtgggattttgaacaatattgtggtgctgtgctgcagttactgtgctgatttaagtgagatcagggtgcgctgctgtgcccggaggacaaggcgccttatgctgcgggcggtgcgaatcatcgctgaggagaccactgccatgttgtattcctgcaggacggagcggcggcggcagcagtttattcgcgcgctgctgcagcaccaccgccctatcctgatgcacgattatgactctacccccatgtagaagcttggggatcaattctctagagctcgctgatcagcctcgactgtgccttctagttgccagccatctgttgtttgcccctcccccgtgccttccttgaccctggaaggtgccactcccactgtcctttcctaataaaatgaggaaattgcatcgcattgtctgagtaggtgtcattctattctggggggtggggtggggcaggacagcaagggggaggattgggaagacaatagcaggcatgctggggatgcggtgggctctatggcttctgaggaaattgggcgtggcttaagggtgggaaagaatatataaggtgggggtcttatgtagttttgtatctgttttgcagcagccgccgccgccatgagcaccaactcgtttgatggaagcattgtgagctcatatttgacaacgcgcatgcccccatgggccggggtgcgtcagaatgtgatgggctccagcattgatggtcgccccgtcctgcccgcaaactctactaccttgacctacgagaccgtgtctggaacgccgttggagactgcagcctccgccgccgcttcagccgctgcagccaccgcccgcgggattgtgactgactttgctttcctgagcccgcttgcaagcagtgcagcttcccgttcatccgcccgcgatgacaagttgacggctcttttggcacaattggattctttgacccgggaacttaatgtcgtttctcagcagctgttggatctgcgccagcaggtttctgccctgaaggcttcctcccctcccaatgcggtttaaaacataaataaaaaaccagactctgtttggatttggatcaagcaagtgtcttgctgtctttatttaggggttttgcgcgcgcggtaggcccgggaccagcggtctcggtcgttgagggtcctgtgtattttttccaggacgtggtaaaggtgactctggatgttcagatacatgggcataagcccgtctctggggtggaggtagcaccactgcagagcttcatgctgcggggtggtgttgtagatgatccagtcgtagcaggagcgctgggcgtggtgcctaaaaatgtctttcagtagcaagctgattgccaggggcaggcccttggtgtaagtgtttacaaagcggttaagctgggatgggtgcatacgtggggatatgagatgcatcttggactgtatttttaggttggctatgttcccagccatatccctccggggattcatgttgtgcagaaccaccagcacagtgtatccggtgcacttgggaaatttgtcatgtagcttagaaggaaatgcgtggaagaacttggagacgcccttgtgacctccaagattttccatgcattcgtccataatgatggcaatgggcccacgggcggcggcctgggcgaagatatttctgggatcactaacgtcatagttgtgttccaggatgagatcgtcataggccatttttacaaagcgcgggcggagggtgccagactgcggtataatggttccatccggcccaggggcgtagttaccctcacagatttgcatttcccacgctttgagttcagatggggggatcatgtctacctgcggggcgatgaagaaaacggtttccggggtaggggagatcagctgggaagaaagcaggttcctgagcagctgcgacttaccgcagccggtgggcccgtaaatcacacctattaccgggtgcaactggtagttaagagagctgcagctgccgtcatccctgagcaggggggccacttcgttaagcatgtccctgactcgcatgttttccctgaccaaatccgccagaaggcgctcgccgcccagcgatagcagttcttgcaaggaagcaaagtttttcaacggtttgagaccgtccgccgtaggcatgcttttgagcgtttgaccaagcagttccaggcggtcccacagctcggtcacctgctctacggcatctcgatccagcatatctcctcgtttcgcgggttggggcggctttcgctgtacggcagtagtcggtgctcgtccagacgggccagggtcatgtctttccacgggcgcagggtcctcgtcagcgtagtctgggtcacggtgaaggggtgcgctccgggctgcgcgctggccagggtgcgcttgaggctggtcctgctggtgctgaagcgctgccggtcttcgccctgcgcgtcggccaggtagcatttgaccatggtgtcatagtccagcccctccgcggcgtggcccttggcgcgcagcttgcccttggaggaggcgccgcacgaggggcagtgcagacttttgagggcgtagagcttgggcgcgagaaataccgattccggggagtaggcatccgcgccgcaggccccgcagacggtctcgcattccacgagccaggtgagctctggccgttcggggtcaaaaaccaggtttcccccatgctttttgatgcgtttcttacctctggtttccatgagccggtgtccacgctcggtgacgaaaaggctgtccgtgtccccgtatacagacttgagaggcctgtcctcgagcggtgttccgcggtcctcctcgtatagaaactcggaccactctgagacaaaggctcgcgtccaggccagcacgaaggaggctaagtgggaggggtagcggtcgttgtccactagggggtccactcgctccagggtgtgaagacacatgtcgccctcttcggcatcaaggaaggtgattggtttgtaggtgtaggccacgtgaccgggtgttcctgaaggggggctataaaagggggtgggggcgcgttcgtcctcactctcttccgcatcgctgtctgcgagggccagctgttggggtgagtactccctctgaaaagcgggcatgacttctgcgctaagattgtcagtttccaaaaacgaggaggatttgatattcacctggcccgcggtgatgcctttgagggtggccgcatccatctggtcagaaaagacaatctttttgttgtcaagcttggtggcaaacgacccgtagagggcgttggacagcaacttggcgatggagcgcagggtttggtttttgtcgcgatcggcgcgctccttggccgcgatgtttagctgcacgtattcgcgcgcaacgcaccgccattcgggaaagacggtggtgcgctcgtcgggcaccaggtgcacgcgccaaccgcggttgtgcagggtgacaaggtcaacgctggtggctacctctccgcgtaggcgctcgttggtccagcagaggcggccgcccttgcgcgagcagaatggcggtagggggtctagctgcgtctcgtccggggggtctgcgtccacggtaaagaccccgggcagcaggcgcgcgtcgaagtagtctatcttgcatccttgcaagtctagcgcctgctgccatgcgcgggcggcaagcgcgcgctcgtatgggttgagtgggggaccccatggcatggggtgggtgagcgcggaggcgtacatgccgcaaatgtcgtaaacgtagaggggctctctgagtattccaagatatgtagggtagcatcttccaccgcggatgctggcgcgcacgtaatcgtatagttcgtgcgagggagcgaggaggtcgggaccgaggttgctacgggcgggctgctctgctcggaagactatctgcctgaagatggcatgtgagttggatgatatggttggacgctggaagacgttgaagctggcgtctgtgagacctaccgcgtcacgcacgaaggaggcgtaggagtcgcgcagcttgttgaccagctcggcggtgacctgcacgtctagggcgcagtagtccagggtttccttgatgatgtcatacttatcctgtcccttttttttccacagctcgcggttgaggacaaactcttcgcggtctttccagtactcttggatcggaaacccgtcggcctccgaacggtaagagcctagcatgtagaactggttgacggcctggtaggcgcagcatcccttttctacgggtagcgcgtatgcctgcgcggccttccggagcgaggtgtgggtgagcgcaaaggtgtccctgaccatgactttgaggtactggtatttgaagtcagtgtcgtcgcatccgccctgctcccagagcaaaaagtccgtgcgctttttggaacgcggatttggcagggcgaaggtgacatcgttgaagagtatctttcccgcgcgaggcataaagttgcgtgtgatgcggaagggtcccggcacctcggaacggttgttaattacctgggcggcgagcacgatctcgtcaaagccgttgatgttgtggcccacaatgtaaagttccaagaagcgcgggatgcccttgatggaaggcaattttttaagttcctcgtaggtgagctcttcaggggagctgagcccgtgctctgaaagggcccagtctgcaagatgagggttggaagcgacgaatgagctccacaggtcacgggccattagcatttgcaggtggtcgcgaaaggtcctaaactggcgacctatggccattttttctggggtgatgcagtagaaggtaagcgggtcttgttcccagcggtcccatccaaggttcgcggctaggtctcgcgcggcagtcactagaggctcatctccgccgaacttcatgaccagcatgaagggcacgagctgcttcccaaaggcccccatccaagtataggtctctacatcgtaggtgacaaagagacgctcggtgcgaggatgcgagccgatcgggaagaactggatctcccgccaccaattggaggagtggctattgatgtggtgaaagtagaagtccctgcgacgggccgaacactcgtgctggcttttgtaaaaacgtgcgcagtactggcagcggtgcacgggctgtacatcctgcacgaggttgacctgacgaccgcgcacaaggaagcagagtgggaatttgagcccctcgcctggcgggtttggctggtggtcttctacttcggctgcttgtccttgaccgtctggctgctcgaggggagttacggtggatcggaccaccacgccgcgcgagcccaaagtccagatgtccgcgcgcggcggtcggagcttgatgacaacatcgcgcagatgggagctgtccatggtctggagctcccgcggcgtcaggtcaggcgggagctcctgcaggtttacctcgcatagacgggtcagggcgcgggctagatccaggtgatacctaatttccaggggctggttggtggcggcgtcgatggcttgcaagaggccgcatccccgcggcgcgactacggtaccgcgcggcgggcggtgggccgcgggggtgtccttggatgatgcatctaaaagcggtgacgcgggcgagcccccggaggtagggggggctccggacccgccgggagagggggcaggggcacgtcggcgccgcgcgcgggcaggagctggtgctgcgcgcgtaggttgctggcgaacgcgacgacgcggcggttgatctcctgaatctggcgcctctgcgtgaagacgacgggcccggtgagcttgaacctgaaagagagttcgacagaatcaatttcggtgtcgttgacggcggcctggcgcaaaatctcctgcacgtctcctgagttgtcttgataggcgatctcggccatgaactgctcgatctcttcctcctggagatctccgcgtccggctcgctccacggtggcggcgaggtcgttggaaatgcgggccatgagctgcgagaaggcgttgaggcctccctcgttccagacgcggctgtagaccacgcccccttcggcatcgcgggcgcgcatgaccacctgcgcgagattgagctccacgtgccgggcgaagacggcgtagtttcgcaggcgctgaaagaggtagttgagggtggtggcggtgtgttctgccacgaagaagtacataacccagcgtcgcaacgtggattcgttgatatcccccaaggcctcaaggcgctccatggcctcgtagaagtccacggcgaagttgaaaaactgggagttgcgcgccgacacggttaactcctcctccagaagacggatgagctcggcgacagtgtcgcgcacctcgcgctcaaaggctacaggggcctcttcttcttcttcaatctcctcttccataagggcctccccttcttcttcttctggcggcggtgggggaggggggacacggcggcgacgacggcgcaccgggaggcggtcgacaaagcgctcgatcatctccccgcggcgacggcgcatggtctcggtgacggcgcggccgttctcgcgggggcgcagttggaagacgccgcccgtcatgtcccggttatgggttggcggggggctgccatgcggcagggatacggcgctaacgatgcatctcaacaattgttgtgtaggtactccgccgccgagggacctgagcgagtccgcatcgaccggatcggaaaacctctcgagaaaggcgtctaaccagtcacagtcgcaaggtaggctgagcaccgtggcgggcggcagcgggcggcggtcggggttgtttctggcggaggtgctgctgatgatgtaattaaagtaggcggtcttgagacggcggatggtcgacagaagcaccatgtccttgggtccggcctgctgaatgcgcaggcggtcggccatgccccaggcttcgttttgacatcggcgcaggtctttgtagtagtcttgcatgagcctttctaccggcacttcttcttctccttcctcttgtcctgcatctcttgcatctatcgctgcggcggcggcggagtttggccgtaggtggcgccctcttcctcccatgcgtgtgaccccgaagcccctcatcggctgaagcagggctaggtcggcgacaacgcgctcggctaatatggcctgctgcacctgcgtgagggtagactggaagtcatccatgtccacaaagcggtggtatgcgcccgtgttgatggtgtaagtgcagttggccataacggaccagttaacggtctggtgacccggctgcgagagctcggtgtacctgagacgcgagtaagccctcgagtcaaatacgtagtcgttgcaagtccgcaccaggtactggtatcccaccaaaaagtgcggcggcggctggcggtagaggggccagcgtagggtggccggggctccgggggcgagatcttccaacataaggcgatgatatccgtagatgtacctggacatccaggtgatgccggcggcggtggtggaggcgcgcggaaagtcgcggacgcggttccagatgttgcgcagcggcaaaaagtgctccatggtcgggacgctctggccggtcaggcgcgcgcaatcgttgacgctctagcgtgcaaaaggagagcctgtaagcgggcactcttccgtggtctggtggataaattcgcaagggtatcatggcggacgaccggggttcgagccccgtatccggccgtccgccgtgatccatgcggttaccgcccgcgtgtcgaacccaggtgtgcgacgtcagacaacgggggagtgctccttttggcttccttccaggcgcggcggctgctgcgctagcttttttggccactggccgcgcgcagcgtaagcggttaggctggaaagcgaaagcattaagtggctcgctccctgtagccggagggttattttccaagggttgagtcgcgggacccccggttcgagtctcggaccggccggactgcggcgaacgggggtttgcctccccgtcatgcaagaccccgcttgcaaattcctccggaaacagggacgagccccttttttgcttttcccagatgcatccggtgctgcggcagatgcgcccccctcctcagcagcggcaagagcaagagcagcggcagacatgcagggcaccctcccctcctcctaccgcgtcaggaggggcgacatccgcggttgacgcggcagcagatggtgattacgaacccccgcggcgccgggcccggcactacctggacttggaggagggcgagggcctggcgcggctaggagcgccctctcctgagcggcacccaagggtgcagctgaagcgtgatacgcgtgaggcgtacgtgccgcggcagaacctgtttcgcgaccgcgagggagaggagcccgaggagatgcgggatcgaaagttccacgcagggcgcgagctgcggcatggcctgaatcgcgagcggttgctgcgcgaggaggactttgagcccgacgcgcgaaccgggattagtcccgcgcgcgcacacgtggcggccgccgacctggtaaccgcatacgagcagacggtgaaccaggagattaactttcaaaaaagctttaacaaccacgtgcgtacgcttgtggcgcgcgaggaggtggctataggactgatgcatctgtgggactttgtaagcgcgctggagcaaaacccaaatagcaagccgctcatggcgcagctgttccttatagtgcagcacagcagggacaacgaggcattcagggatgcgctgctaaacatagtagagcccgagggccgctggctgctcgatttgataaacatcctgcagagcatagtggtgcaggagcgcagcttgagcctggctgacaaggtggccgccatcaactattccatgcttagcctgggcaagttttacgcccgcaagatataccataccccttacgttcccatagacaaggaggtaaagatcgaggggttctacatgcgcatggcgctgaaggtgcttaccttgagcgacgacctgggcgtttatcgcaacgagcgcatccacaaggccgtgagcgtgagccggcggcgcgagctcagcgaccgcgagctgatgcacagcctgcaaagggccctggctggcacgggcagcggcgatagagaggccgagtcctactttgacgcgggcgctgacctgcgctgggccccaagccgacgcgccctggaggcagctggggccggacctgggctggcggtggcacccgcgcgcgctggcaacgtcggcggcgtggaggaatatgacgaggacgatgagtacgagccagaggacggcgagtactaagcggtgatgtttctgatcagatgatgcaagacgcaacggacccggcggtgcgggcggcgctgcagagccagccgtccggccttaactccacggacgactggcgccaggtcatggaccgcatcatgtcgctgactgcgcgcaatcctgacgcgttccggcagcagccgcaggccaaccggctctccgcaattctggaagcggtggtcccggcgcgcgcaaaccccacgcacgagaaggtgctggcgatcgtaaacgcgctggccgaaaacagggccatccggcccgacgaggccggcctggtctacgacgcgctgcttcagcgcgtggctcgttacaacagcggcaacgtgcagaccaacctggaccggctggtgggggatgtgcgcgaggccgtggcgcagcgtgagcgcgcgcagcagcagggcaacctgggctccatggttgcactaaacgccttcctgagtacacagcccgccaacgtgccgcggggacaggaggactacaccaactttgtgagcgcactgcggctaatggtgactgagacaccgcaaagtgaggtgtaccagtctgggccagactattttttccagaccagtagacaaggcctgcagaccgtaaacctgagccaggctttcaaaaacttgcaggggctgtggggggtgcgggctcccacaggcgaccgcgcgaccgtgtctagcttgctgacgcccaactcgcgcctgttgctgctgctaatagcgcccttcacggacagtggcagcgtgtcccgggacacatacctaggtcacttgctgacactgtaccgcgaggccataggtcaggcgcatgtggacgagcatactttccaggagattacaagtgtcagccgcgcgctggggcaggaggacacgggcagcctggaggcaaccctaaactacctgctgaccaaccggcggcagaagatcccctcgttgcacagtttaaacagcgaggaggagcgcattttgcgctacgtgcagcagagcgtgagccttaacctgatgcgcgacggggtaacgcccagcgtggcgctggacatgaccgcgcgcaacatggaaccgggcatgtatgcctcaaaccggccgtttatcaaccgcctaatggactacttgcatcgcgcggccgccgtgaaccccgagtatttcaccaatgccatcttgaacccgcactggctaccgccccctggtttctacaccgggggattcgaggtgcccgagggtaacgatggattcctctgggacgacatagacgacagcgtgttttccccgcaaccgcagaccctgctagagttgcaacagcgcgagcaggcagaggcggcgctgcgaaaggaaagcttccgcaggccaagcagcttgtccgatctaggcgctgcggccccgcggtcagatgctagtagcccatttccaagcttgatagggtctcttaccagcactcgcaccacccgcccgcgcctgctgggcgaggaggagtacctaaacaactcgctgctgcagccgcagcgcgaaaaaaacctgcctccggcatttcccaacaacgggatagagagcctagtggacaagatgagtagatggaagacgtacgcgcaggagcacagggacgtgccaggcccgcgcccgcccacccgtcgtcaaaggcacgaccgtcagcggggtctggtgtgggaggacgatgactcggcagacgacagcagcgtcctggatttgggagggagtggcaacccgtttgcgcaccttcgccccaggctggggagaatgttttaaaaaaaaaaaagcatgatgcaaaataaaaaactcaccaaggccatggcaccgagcgttggttttcttgtattccccttagtatgcggcgcgcggcgatgtatgaggaaggtcctcctccctcctacgagagtgtggtgagcgcggcgccagtggcggcggcgctgggttctcccttcgatgctcccctggacccgccgtttgtgcctccgcggtacctgcggcctaccggggggagaaacagcatccgttactctgagttggcacccctattcgacaccacccgtgtgtacctggtggacaacaagtcaacggatgtggcatccctgaactaccagaacgaccacagcaactttctgaccacggtcattcaaaacaatgactacagcccgggggaggcaagcacacagaccatcaatcttgacgaccggtcgcactggggcggcgacctgaaaaccatcctgcataccaacatgccaaatgtgaacgagttcatgtttaccaataagtttaaggcgcgggtgatggtgtcgcgcttgcctactaaggacaatcaggtggagctgaaatacgagtgggtggagttcacgctgcccgagggcaactactccgagaccatgaccatagaccttatgaacaacgcgatcgtggagcactacttgaaagtgggcagacagaacggggttctggaaagcgacatcggggtaaagtttgacacccgcaacttcagactggggtttgaccccgtcactggtcttgtcatgcctggggtatatacaaacgaagccttccatccagacatcattttgctgccaggatgcggggtggacttcacccacagccgcctgagcaacttgttgggcatccgcaagcggcaacccttccaggagggctttaggatcacctacgatgatctggagggtggtaacattcccgcactgttggatgtggacgcctaccaggcgagcttgaaagatgacaccgaacagggcgggggtggcgcaggcggcagcaacagcagtggcagcggcgcggaagagaactccaacgcggcagccgcggcaatgcagccggtggaggacatgaacgatcatgccattcgcggcgacacctttgccacacgggctgaggagaagcgcgctgaggccgaagcagcggccgaagctgccgcccccgctgcgcaacccgaggtcgagaagcctcagaagaaaccggtgatcaaacccctgacagaggacagcaagaaacgcagttacaacctaataagcaatgacagcaccttcacccagtaccgcagctggtaccttgcatacaactacggcgaccctcagaccggaatccgctcatggaccctgctttgcactcctgacgtaacctgcggctcggagcaggtctactggtcgttgccagacatgatgcaagaccccgtgaccttccgctccacgcgccagatcagcaactttccggtggtgggcgccgagctgttgcccgtgcactccaagagcttctacaacgaccaggccgtctactcccaactcatccgccagtttacctctctgacccacgtgttcaatcgctttcccgagaaccagattttggcgcgcccgccagcccccaccatcaccaccgtcagtgaaaacgttcctgctctcacagatcacgggacgctaccgctgcgcaacagcatcggaggagtccagcgagtgaccattactgacgccagacgccgcacctgcccctacgtttacaaggccctgggcatagtctcgccgcgcgtcctatcgagccgcactttttgagcaagcatgtccatccttatatcgcccagcaataacacaggctggggcctgcgcttcccaagcaagatgtttggcggggccaagaagcgctccgaccaacacccagtgcgcgtgcgcgggcactaccgcgcgccctggggcgcgcacaaacgcggccgcactgggcgcaccaccgtcgatgacgccatcgacgcggtggtggaggaggcgcgcaactacacgcccacgccgccaccagtgtccacagtggacgcggccattcagaccgtggtgcgcggagcccggcgctatgctaaaatgaagagacggcggaggcgcgtagcacgtcgccaccgccgccgacccggcactgccgcccaacgcgcggcggcggccctgcttaaccgcgcacgtcgcaccggccgacgggcggccatgcgggccgctcgaaggctggccgcgggtattgtcactgtgccccccaggtccaggcgacgagcggccgccgcagcagccgcggccattagtgctatgactcagggtcgcaggggcaacgtgtattgggtgcgcgactcggttagcggcctgcgcgtgcccgtgcgcacccgccccccgcgcaactagattgcaagaaaaaactacttagactcgtactgttgtatgtatccagcggcggcggcgcgcaacgaagctatgtccaagcgcaaaatcaaagaagagatgctccaggtcatcgcgccggagatctatggccccccgaagaaggaagagcaggattacaagccccgaaagctaaagcgggtcaaaaagaaaaagaaagatgatgatgatgaacttgacgacgaggtggaactgctgcacgctaccgcgcccaggcgacgggtacagtggaaaggtcgacgcgtaaaacgtgttttgcgacccggcaccaccgtagtctttacgcccggtgagcgctccacccgcacctacaagcgcgtgtatgatgaggtgtacggcgacgaggacctgcttgagcaggccaacgagcgcctcggggagtttgcctacggaaagcggcataaggacatgctggcgttgccgctggacgagggcaacccaacacctagcctaaagcccgtaacactgcagcaggtgctgcccgcgcttgcaccgtccgaagaaaagcgcggcctaaagcgcgagtctggtgacttggcacccaccgtgcagctgatggtacccaagcgccagcgactggaagatgtcttggaaaaaatgaccgtggaacctgggctggagcccgaggtccgcgtgcggccaatcaagcaggtggcgccgggactgggcgtgcagaccgtggacgttcagatacccactaccagtagcaccagtattgccaccgccacagagggcatggagacacaaacgtccccggttgcctcagcggtggcggatgccgcggtgcaggcggtcgctgcggccgcgtccaagacctctacggaggtgcaaacggacccgtggatgtttcgcgtttcagccccccggcgcccgcgccgttcgaggaagtacggcgccgccagcgcgctactgcccgaatatgccctacatccttccattgcgcctacccccggctatcgtggctacacctaccgccccagaagacgagcaactacccgacgccgaaccaccactggaacccgccgccgccgtcgccgtcgccagcccgtgctggccccgatttccgtgcgcagggtggctcgcgaaggaggcaggaccctggtgctgccaacagcgcgctaccaccccagcatcgtttaaaagccggtctttgtggttcttgcagatatggccctcacctgccgcctccgtttcccggtgccgggattccgaggaagaatgcaccgtaggaggggcatggccggccacggcctgacgggcggcatgcgtcgtgcgcaccaccggcggcggcgcgcgtcgcaccgtcgcatgcgcggcggtatcctgcccctccttattccactgatcgccgcggcgattggcgccgtgcccggaattgcatccgtggccttgcaggcgcagagacactgattaaaaacaagttgcatgtggaaaaatcaaaataaaaagtctggactctcacgctcgcttggtcctgtaactattttgtagaatggaagacatcaactttgcgtctctggccccgcgacacggctcgcgcccgttcatgggaaactggcaagatatcggcaccagcaatatgagcggtggcgccttcagctggggctcgctgtggagcggcattaaaaatttcggttccaccgttaagaactatggcagcaaggcctggaacagcagcacaggccagatgctgagggataagttgaaagagcaaaatttccaacaaaaggtggtagatggcctggcctctggcattagcggggtggtggacctggccaaccaggcagtgcaaaataagattaacagtaagcttgatccccgccctcccgtagaggagcctccaccggccgtggagacagtgtctccagaggggcgtggcgaaaagcgtccgcgccccgacagggaagaaactctggtgacgcaaatagacgagcctccctcgtacgaggaggcactaaagcaaggcctgcccaccacccgtcccatcgcgcccatggctaccggagtgctgggccagcacacacccgtaacgctggacctgcctccccccgccgacacccagcagaaacctgtgctgccaggcccgaccgccgttgttgtaacccgtcctagccgcgcgtccctgcgccgcgccgccagcggtccgcgatcgttgcggcccgtagccagtggcaactggcaaagcacactgaacagcatcgtgggtctgggggtgcaatccctgaagcgccgacgatgcttctgatagctaacgtgtcgtatgtgtgtcatgtatgcgtccatgtcgccgccagaggagctgctgagccgccgcgcgcccgctttccaagatggctaccccttcgatgatgccgcagtggtcttacatgcacatctcgggccaggacgcctcggagtacctgagccccgggctggtgcagtttgcccgcgccaccgagacgtacttcagcctgaataacaagtttagaaaccccacggtggcgcctacgcacgacgtgaccacagaccggtcccagcgtttgacgctgcggttcatccctgtggaccgtgaggatactgcgtactcgtacaaggcgcggttcaccctagctgtgggtgataaccgtgtgctggacatggcttccacgtactttgacatccgcggcgtgctggacaggggccctacttttaagccctactctggcactgcctacaacgccctggctcccaagggtgccccaaatccttgcgaatgggatgaagctgctactgctcttgaaataaacctagaagaagaggacgatgacaacgaagacgaagtagacgagcaagctgagcagcaaaaaactcacgtatttgggcaggcgccttattctggtataaatattacaaaggagggtattcaaataggtgtcgaaggtcaaacacctaaatatgccgataaaacatttcaacctgaacctcaaataggagaatctcagtggtacgaaacagaaattaatcatgcagctgggagagtcctaaaaaagactaccccaatgaaaccatgttacggttcatatgcaaaacccacaaatgaaaatggagggcaaggcattcttgtaaagcaacaaaatggaaagctagaaagtcaagtggaaatgcaatttttctcaactactgaggcagccgcaggcaatggtgataacttgactcctaaagtggtattgtacagtgaagatgtagatatagaaaccccagacactcatatttcttacatgcccactattaaggaaggtaactcacgagaactaatgggccaacaatctatgcccaacaggcctaattacattgcttttagggacaattttattggtctaatgtattacaacagcacgggtaatatgggtgttctggcgggccaagcatcgcagttgaatgctgttgtagatttgcaagacagaaacacagagctttcataccagcttttgcttgattccattggtgatagaaccaggtacttttctatgtggaatcaggctgttgacagctatgatccagatgttagaattattgaaaatcatggaactgaagatgaacttccaaattactgctttccactgggaggtgtgattaatacagagactcttaccaaggtaaaacctaaaacaggtcaggaaaatggatgggaaaaagatgctacagaattttcagataaaaatgaaataagagttggaaataattttgccatggaaatcaatctaaatgccaacctgtggagaaatttcctgtactccaacatagcgctgtatttgcccgacaagctaaagtacagtccttccaacgtaaaaatttctgataacccaaacacctacgactacatgaacaagcgagtggtggctcccgggctagtggactgctacattaaccttggagcacgctggtcccttgactatatggacaacgtcaacccatttaaccaccaccgcaatgctggcctgcgctaccgctcaatgttgctgggcaatggtcgctatgtgcccttccacatccaggtgcctcagaagttctttgccattaaaaacctccttctcctgccgggctcatacacctacgagtggaacttcaggaaggatgttaacatggttctgcagagctccctaggaaatgacctaagggttgacggagccagcattaagtttgatagcatttgcctttacgccaccttcttccccatggcccacaacaccgcctccacgcttgaggccatgcttagaaacgacaccaacgaccagtcctttaacgactatctctccgccgccaacatgctctaccctatacccgccaacgctaccaacgtgcccatatccatcccctcccgcaactgggcggctttccgcggctgggccttcacgcgccttaagactaaggaaaccccatcactgggctcgggctacgacccttattacacctactctggctctataccctacctagatggaaccttttacctcaaccacacctttaagaaggtggccattacctttgactcttctgtcagctggcctggcaatgaccgcctgcttacccccaacgagtttgaaattaagcgctcagttgacggggagggttacaacgttgcccagtgtaacatgaccaaagactggttcctggtacaaatgctagctaactataacattggctaccagggcttctatatcccagagagctacaaggaccgcatgtactccttctttagaaacttccagcccatgagccgtcaggtggtggatgatactaaatacaaggactaccaacaggtgggcatcctacaccaacacaacaactctggatttgttggctaccttgcccccaccatgcgcgaaggacaggcctaccctgctaacttcccctatccgcttataggcaagaccgcagttgacagcattacccagaaaaagtttctttgcgatcgcaccctttggcgcatcccattctccagtaactttatgtccatgggcgcactcacagacctgggccaaaaccttctctacgccaactccgcccacgcgctagacatgacttttgaggtggatcccatggacgagcccacccttctttatgttttgtttgaagtctttgacgtggtccgtgtgcaccagccgcaccgcggcgtcatcgaaaccgtgtacctgcgcacgcccttctcggccggcaacgccacaacataaagaagcaagcaacatcaacaacagctgccgccatgggctccagtgagcaggaactgaaagccattgtcaaagatcttggttgtgggccatattttttgggcacctatgacaagcgctttccaggctttgtttctccacacaagctcgcctgcgccatagtcaatacggccggtcgcgagactgggggcgtacactggatggcctttgcctggaacccgcactcaaaaacatgctacctctttgagccctttggcttttctgaccagcgactcaagcaggtttaccagtttgagtacgagtcactcctgcgccgtagcgccattgcttcttcccccgaccgctgtataacgctggaaaagtccacccaaagcgtacaggggcccaactcggccgcctgtggactattctgctgcatgtttctccacgcctttgccaactggccccaaactcccatggatcacaaccccaccatgaaccttattaccggggtacccaactccatgctcaacagtccccaggtacagcccaccctgcgtcgcaaccaggaacagctctacagcttcctggagcgccactcgccctacttccgcagccacagtgcgcagattaggagcgccacttctttttgtcacttgaaaaacatgtaaaaataatgtactagagacactttcaataaaggcaaatgcttttatttgtacactctcgggtgattatttacccccacccttgccgtctgcgccgtttaaaaatcaaaggggttctgccgcgcatcgctatgcgccactggcagggacacgttgcgatactggtgtttagtgctccacttaaactcaggcacaaccatccgcggcagctcggtgaagttttcactccacaggctgcgcaccatcaccaacgcgtttagcaggtcgggcgccgatatcttgaagtcgcagttggggcctccgccctgcgcgcgcgagttgcgatacacagggttgcagcactggaacactatcagcgccgggtggtgcacgctggccagcacgctcttgtcggagatcagatccgcgtccaggtcctccgcgttgctcagggcgaacggagtcaactttggtagctgccttcccaaaaagggcgcgtgcccaggctttgagttgcactcgcaccgtagtggcatcaaaaggtgaccgtgcccggtctgggcgttaggatacagcgcctgcataaaagccttgatctgcttaaaagccacctgagcctttgcgccttcagagaagaacatgccgcaagacttgccggaaaactgattggccggacaggccgcgtcgtgcacgcagcaccttgcgtcggtgttggagatctgcaccacatttcggccccaccggttcttcacgatcttggccttgctagactgctccttcagcgcgcgctgcccgttttcgctcgtcacatccatttcaatcacgtgctccttatttatcataatgcttccgtgtagacacttaagctcgccttcgatctcagcgcagcggtgcagccacaacgcgcagcccgtgggctcgtgatgcttgtaggtcacctctgcaaacgactgcaggtacgcctgcaggaatcgccccatcatcgtcacaaaggtcttgttgctggtgaaggtcagctgcaacccgcggtgctcctcgttcagccaggtcttgcatacggccgccagagcttccacttggtcaggcagtagtttgaagttcgcctttagatcgttatccacgtggtacttgtccatcagcgcgcgcgcagcctccatgcccttctcccacgcagacacgatcggcacactcagcgggttcatcaccgtaatttcactttccgcttcgctgggctcttcctcttcctcttgcgtccgcataccacgcgccactgggtcgtcttcattcagccgccgcactgtgcgcttacctcctttgccatgcttgattagcaccggtgggttgctgaaacccaccatttgtagcgccacatcttctctttcttcctcgctgtccacgattacctctggtgatggcgggcgctcgggcttgggagaagggcgcttctttttcttcttgggcgcaatggccaaatccgccgccgaggtcgatggccgcgggctgggtgtgcgcggcaccagcgcgtcttgtgatgagtcttcctcgtcctcggactcgatacgccgcctcatccgcttttttgggggcgcccggggaggcggcggcgacggggacggggacgacacgtcctccatggttgggggacgtcgcgccgcaccgcgtccgcgctcgggggtggtttcgcgctgctcctcttcccgactggccatttccttctcctataggcagaaaaagatcatggagtcagtcgagaagaaggacagcctaaccgccccctctgagttcgccaccaccgcctccaccgatgccgccaacgcgcctaccaccttccccgtcgaggcacccccgcttgaggaggaggaagtgattatcgagcaggacccaggttttgtaagcgaagacgacgaggaccgctcagtaccaacagaggataaaaagcaagaccaggacaacgcagaggcaaacgaggaacaagtcgggcggggggacgaaaggcatggcgactacctagatgtgggagacgacgtgctgttgaagcatctgcagcgccagtgcgccattatctgcgacgcgttgcaagagcgcagcgatgtgcccctcgccatagcggatgtcagccttgcctacgaacgccacctattctcaccgcgcgtaccccccaaacgccaagaaaacggcacatgcgagcccaacccgcgcctcaacttctaccccgtatttgccgtgccagaggtgcttgccacctatcacatctttttccaaaactgcaagatacccctatcctgccgtgccaaccgcagccgagcggacaagcagctggccttgcggcagggcgctgtcatacctgatatcgcctcgctcaacgaagtgccaaaaatctttgagggtcttggacgcgacgagaagcgcgcggcaaacgctctgcaacaggaaaacagcgaaaatgaaagtcactctggagtgttggtggaactcgagggtgacaacgcgcgcctagccgtactaaaacgcagcatcgaggtcacccactttgcctacccggcacttaacctaccccccaaggtcatgagcacagtcatgagtgagctgatcgtgcgccgtgcgcagcccctggagagggatgcaaatttgcaagaacaaacagaggagggcctacccgcagttggcgacgagcagctagcgcgctggcttcaaacgcgcgagcctgccgacttggaggagcgacgcaaactaatgatggccgcagtgctcgttaccgtggagcttgagtgcatgcagcggttctttgctgacccggagatgcagcgcaagctagaggaaacattgcactacacctttcgacagggctacgtacgccaggcctgcaagatctccaacgtggagctctgcaacctggtctcctaccttggaattttgcacgaaaaccgccttgggcaaaacgtgcttcattccacgctcaagggcgaggcgcgccgcgactacgtccgcgactgcgtttacttatttctatgctacacctggcagacggccatgggcgtttggcagcagtgcttggaggagtgcaacctcaaggagctgcagaaactgctaaagcaaaacttgaaggacctatggacggccttcaacgagcgctccgtggccgcgcacctggcggacatcattttccccgaacgcctgcttaaaaccctgcaacagggtctgccagacttcaccagtcaaagcatgttgcagaactttaggaactttatcctagagcgctcaggaatcttgcccgccacctgctgtgcacttcctagcgactttgtgcccattaagtaccgcgaatgccctccgccgctttggggccactgctaccttctgcagctagccaactaccttgcctaccactctgacataatggaagacgtgagcggtgacggtctactggagtgtcactgtcgctgcaacctatgcaccccgcaccgctccctggtttgcaattcgcagctgcttaacgaaagtcaaattatcggtacctttgagctgcagggtccctcgcctgacgaaaagtccgcggctccggggttgaaactcactccggggctgtggacgtcggcttaccttcgcaaatttgtacctgaggactaccacgcccacgagattaggttctacgaagaccaatcccgcccgcctaatgcggagcttaccgcctgcgtcattacccagggccacattcttggccaattgcaagccatcaacaaagcccgccaagagtttctgctacgaaagggacggggggtttacttggacccccagtccggcgaggagctcaacccaatccccccgccgccgcagccctatcagcagcagccgcgggcccttgcttcccaggatggcacccaaaaagaagctgcagctgccgccgccacccacggacgaggaggaatactgggacagtcaggcagaggaggttttggacgaggaggaggaggacatgatggaagactgggagagcctagacgaggaagcttccgaggtcgaagaggtgtcagacgaaacaccgtcaccctcggtcgcattcccctcgccggcgccccagaaatcggcaaccggttccagcatggctacaacctccgctcctcaggcgccgccggcactgcccgttcgccgacccaaccgtagatgggacaccactggaaccagggccggtaagtccaagcagccgccgccgttagcccaagagcaacaacagcgccaaggctaccgctcatggcgcgggcacaagaacgccatagttgcttgcttgcaagactgtgggggcaacatctccttcgcccgccgctttcttctctaccatcacggcgtggccttcccccgtaacatcctgcattactaccgtcatctctacagcccatactgcaccggcggcagcggcagcaacagcagcggccacacagaagcaaaggcgaccggatagcaagactctgacaaagcccaagaaatccacagcggcggcagcagcaggaggaggagcgctgcgtctggcgcccaacgaacccgtatcgacccgcgagcttagaaacaggatttttcccactctgtatgctatatttcaacagagcaggggccaagaacaagagctgaaaataaaaaacaggtctctgcgatccctcacccgcagctgcctgtatcacaaaagcgaagatcagcttcggcgcacgctggaagacgcggaggctctcttcagtaaatactgcgcgctgactcttaaggactagtttcgcgccctttctcaaatttaagcgcgaaaactacgtcatctccagcggccacacccggcgccagcacctgttgtcagcgccattatgagcaaggaaattcccacgccctacatgtggagttaccagccacaaatgggacttgcggctggagctgcccaagactactcaacccgaataaactacatgagcgcgggaccccacatgatatcccgggtcaacggaatacgcgcccaccgaaaccgaattctcctggaacaggcggctattaccaccacacctcgtaataaccttaatccccgtagttggcccgctgccctggtgtaccaggaaagtcccgctcccaccactgtggtacttcccagagacgcccaggccgaagttcagatgactaactcaggggcgcagcttgcgggcggctttcgtcacagggtgcggtcgcccgggcagggtataactcacctgacaatcagagggcgaggtattcagctcaacgacgagtcggtgagctcctcgcttggtctccgtccggacgggacatttcagatcggcggcgccggccgctcttcattcacgcctcgtcaggcaatcctaactctgcagacctcgtcctctgagccgcgctctggaggcattggaactctgcaatttattgaggagtttgtgccatcggtctactttaaccccttctcgggacctcccggccactatccggatcaatttattcctaactttgacgcggtaaaggactcggcggacggctacgactgaatgttaagtggagaggcagagcaactgcgcctgaaacacctggtccactgtcgccgccacaagtgctttgcccgcgactccggtgagttttgctactttgaattgcccgaggatcatatcgagggcccggcgcacggcgtccggcttaccgcccagggagagcttgcccgtagcctgattcgggagtttacccagcgccccctgctagttgagcgggacaggggaccctgtgttctcactgtgatttgcaactgtcctaaccctggattacatcaagatcctctagttaatgtcaggtcgcctaagtcgattaactagagtacccggggatcttattccctttaactaataaaaaaaaataataaagcatcacttacttaaaatcagttagcaaatttctgtccagtttattcagcagcacctccttgccctcctcccagctctggtattgcagcttcctcctggctgcaaactttctccacaatctaaatggaatgtcagtttcctcctgttcctgtccatccgcacccactatcttcatgttgttgcagatgaagcgcgcaagaccgtctgaagataccttcaaccccgtgtatccatatgacacggaaaccggtcctccaactgtgccttttcttactcctccctttgtatcccccaatgggtttcaagagagtccccctggggtactctctttgcgcctatccgaacctctagttacctccaatggcatgcttgcgctcaaaatgggcaacggcctctctctggacgaggccggcaaccttacctcccaaaatgtaaccactgtgagcccacctctcaaaaaaaccaagtcaaacataaacctggaaatatctgcacccctcacagttacctcagaagccctaactgtggctgccgccgcacctctaatggtcgcgggcaacacactcaccatgcaatcacaggccccgctaaccgtgcacgactccaaacttagcattgccacccaaggacccctcacagtgtcagaaggaaagctagccctgcaaacatcaggccccctcaccaccaccgatagcagtacccttactatcactgcctcaccccctctaactactgccactggtagcttgggcattgacttgaaagagcccatttatacacaaaatggaaaactaggactaaagtacggggctcctttgcatgtaacagacgacctaaacactttgaccgtagcaactggtccaggtgtgactattaataatacttccttgcaaactaaagttactggagccttgggttttgattcacaaggcaatatgcaacttaatgtagcaggaggactaaggattgattctcaaaacagacgccttatacttgatgttagttatccgtttgatgctcaaaaccaactaaatctaagactaggacagggccctctttttataaactcagcccacaacttggatattaactacaacaaaggcctttacttgtttacagcttcaaacaattccaaaaagcttgaggttaacctaagcactgccaaggggttgatgtttgacgctacagccatagccattaatgcaggagatgggcttgaatttggttcacctaatgcaccaaacacaaatcccctcaaaacaaaaattggccatggcctagaatttgattcaaacaaggctatggttcctaaactaggaactggccttagttttgacagcacaggtgccattacagtaggaaacaaaaataatgataagctaactttgtggaccggaataaaccctccacctaactgtcaaattgtggaaaacactaatacaaatgatggcaaacttactttagtattagtaaaaaatggagggcttgttaatggctacgtgtctctagttggtgtatcagacactgtgaaccaaatgttcacacaaaagacagcaaacatccaattaagattatattttgactcttctggaaatctattaactgaggaatcagacttaaaaattccacttaaaaataaatcttctacagcgaccagtgaaactgtagccagcagcaaagcctttatgccaagtactacagcttatcccttcaacaccactactagggatagtgaaaactacattcatggaatatgttactacatgactagttatgatagaagtctatttcccttgaacatttctataatgctaaacagccgtatgatttcttccaatgttgcctatgccatacaatttgaatggaatctaaatgcaagtgaatctccagaaagcaacatagctacgctgaccacatccccctttttcttttcttacattacagaagacgacaactaaagaatcgtttgtgttatgtttcaacgtgtttatttttcaattgcagaaaatttcaagtcatttttcattcagtagtatagccccaccaccacatagcttatacagatcaccgtaccttaatcaaactcacagaaccctagtattcaacctgccacctccctcccaacacacagagtacacagtcctttctccccggctggccttaaaaagcatcatatcatgggtaacagacatattcttaggtgttatattccacacggtttcctgtcgagccaaacgctcatcagtgatattaataaactccccgggcagctcacttaagttcatgtcgctgtccagctgctgagccacaggctgctgtccaacttgcggttgcttaacgggcggcgaaggagaagtccacgcctacatgggggtagagtcataatcgtgcatcaggatagggcggtggtgctgcagcagcgcgcgaataaactgctgccgccgccgctccgtcctgcaggaatacaacatggcagtggtctcctcagcgatgattcgcaccgcccgcagcataaggcgccttgtcctccgggcacagcagcgcaccctgatctcacttaaatcagcacagtaactgcagcacagcaccacaatattgttcaaaatcccacagtgcaaggcgctgtatccaaagctcatggcggggaccacagaacccacgtggccatcataccacaagcgcaggtagattaagtggcgacccctcataaacacgctggacataaacattacctcttttggcatgttgtaattcaccacctcccggtaccatataaacctctgattaaacatggcgccatccaccaccatcctaaaccagctggccaaaacctgcccgccggctatacactgcagggaaccgggactggaacaatgacagtggagagcccaggactcgtaaccatggatcatcatgctcgtcatgatatcaatgttggcacaacacaggcacacgtgcatacacttcctcaggattacaagctcctcccgcgttagaaccatatcccagggaacaacccattcctgaatcagcgtaaatcccacactgcagggaagacctcgcacgtaactcacgttgtgcattgtcaaagtgttacattcgggcagcagcggatgatcctccagtatggtagcgcgggtttctgtctcaaaaggaggtagacgatccctactgtacggagtgcgccgagacaaccgagatcgtgttggtcgtagtgtcatgccaaatggaacgccggacgtagtcatatttcctgaagcaaaaccaggtgcgggcgtgacaaacagatctgcgtctccggtctcgccgcttagatcgctctgtgtagtagttgtagtatatccactctctcaaagcatccaggcgccccctggcttcgggttctatgtaaactccttcatgcgccgctgccctgataacatccaccaccgcagaataagccacacccagccaacctacacattcgttctgcgagtcacacacgggaggagcgggaagagctggaagaaccatgtttttttttttattccaaaagattatccaaaacctcaaaatgaagatctattaagtgaacgcgctcccctccggtggcgtggtcaaactctacagccaaagaacagataatggcatttgtaagatgttgcacaatggcttccaaaaggcaaacggccctcacgtccaagtggacgtaaaggctaaacccttcagggtgaatctcctctataaacattccagcaccttcaaccatgcccaaataattctcatctcgccaccttctcaatatatctctaagcaaatcccgaatattaagtccggccattgtaaaaatctgctccagagcgccctccaccttcagcctcaagcagcgaatcatgattgcaaaaattcaggttcctcacagacctgtataagattcaaaagcggaacattaacaaaaataccgcgatcccgtaggtcccttcgcagggccagctgaacataatcgtgcaggtctgcacggaccagcgcggccacttccccgccaggaaccatgacaaaagaacccacactgattatgacacgcatactcggagctatgctaaccagcgtagccccgatgtaagcttgttgcatgggcggcgatataaaatgcaaggtgctgctcaaaaaatcaggcaaagcctcgcgcaaaaaagaaagcacatcgtagtcatgctcatgcagataaaggcaggtaagctccggaaccaccacagaaaaagacaccatttttctctcaaacatgtctgcgggtttctgcataaacacaaaataaaataacaaaaaaacatttaaacattagaagcctgtcttacaacaggaaaaacaacccttataagcataagacggactacggccatgccggcgtgaccgtaaaaaaactggtcaccgtgattaaaaagcaccaccgacagctcctcggtcatgtccggagtcataatgtaagactcggtaaacacatcaggttgattcacatcggtcagtgctaaaaagcgaccgaaatagcccgggggaatacatacccgcaggcgtagagacaacattacagcccccataggaggtataacaaaattaataggagagaaaaacacataaacacctgaaaaaccctcctgcctaggcaaaatagcaccctcccgctccagaacaacatacagcgcttccacagcggcagccataacagtcagccttaccagtaaaaaagaaaacctattaaaaaaacaccactcgacacggcaccagctcaatcagtcacagtgtaaaaaagggccaagtgcagagcgagtatatataggactaaaaaatgacgtaacggttaaagtccacaaaaaacacccagaaaaccgcacgcgaacctacgcccagaaacgaaagccaaaaaacccacaacttcctcaaatcgtcacttccgttttcccacgttacgtcacttcccattttaagaaaactacaattcccaacacatacaagttactccgccctaaaacctacgtcacccgccccgttcccacgccccgcgccacgtcacaaactccaccccctcattatcatattggcttcaatccaaaataaggtatattattgatgatg

SEQ ID NO: 20 - DNA, 36151 bp, Artificial Sequence
  pAdk35F2-Spike/E4orf6(-0.25kb)-E4dl355(E4re#15)
ttaattaacatcatcaataatataccttattttggattgaagccaatatgataatgagggggtggagtttgtgacgtggcgcggggcgtgggaacggggcgggtgacgtagtagtgtggcggaagtgtgatgttgcaagtgtggcggaacacatgtaagcgacggatgtggcaaaagtgacgtttttggtgtgcgccggtgtacacaggaagtgacaattttcgcgcggttttaggcggatgttgtagtaaatttgggcgtaaccgagtaagatttggccattttcgcgggaaaactgaataagaggaagtgaaatctgaataattttgtgttactcatagcgcgtaataatttctgtaatagtaatcaattacggggtcattagttcatagcccatatatggagttccgcgttacataacttacggtaaatggcccgcctggctgaccgcccaacgacccccgcccattgacgtcaataatgacgtatgttcccatagtaacgccaatagggactttccattgacgtcaatgggtggagtatttacggtaaactgcccacttggcagtacatcaagtgtatcatatgccaagtacgccccctattgacgtcaatgacggtaaatggcccgcctggcattatgcccagtacatgaccttatgggactttcctacttggcagtacatctacgtattagtcatcgctattaccatggtgatgcggttttggcagtacatcaatgggcgtggatagcggtttgactcacggggatttccaagtctccaccccattgacgtcaatgggagtttgttttggcaccaaaatcaacgggactttccaaaatgtcgtaacaactccgccccattgacgcaaatgggcggtaggcgtgtacggtgggaggtctatataagcagagctctccctatcagtgatagagatctccctatcagtgatagagatcgtcgacgagctcgtttagtgaaccgtcagatcgcctggagacgccatccacgctgttttgacctccatagaagacaccgggaccgatccagcctccgatttgccaccatgtttgtgttcctggtgctgctgccactggtgtccagccagtgtgtgaacctgaccaccaggacccaacttcctcctgcctacaccaactccttcaccaggggagtctactaccctgacaaggtgttcaggtcctctgtgctgcacagcacccaggacctgttcctgccattcttcagcaatgtgacctggttccatgccatccatgtgtctggcaccaatggcaccaagaggtttgacaaccctgtgctgccattcaatgatggagtctactttgccagcacagagaagagcaacatcatcaggggctggatttttggcaccaccctggacagcaagacccagtccctgctgattgtgaacaatgccaccaatgtggtgattaaggtgtgtgagttccagttctgtaatgacccattcctgggagtctactaccacaagaacaacaagtcctggatggagtctgagttcagggtctactcctctgccaacaactgtacctttgaatatgtgagccaaccattcctgatggacttggagggcaagcagggcaacttcaagaacctgagggagtttgtgttcaagaacattgatggctacttcaagatttacagcaaacacacaccaatcaacctggtgagggacctgccacagggcttctctgccttggaaccactggtggacctgccaattggcatcaacatcaccaggttccagaccctgctggctctgcacaggtcctacctgacacctggagactcctcctctggctggacagcaggagcagcagcctactatgtgggctacctccaaccaaggaccttcctgctgaaatacaatgagaatggcaccatcacagatgctgtggactgtgccctggacccactgtctgagaccaagtgtaccctgaaatccttcacagtggagaagggcatctaccagaccagcaacttcagggtccaaccaacagagagcattgtgaggtttccaaacatcaccaacctgtgtccatttggagaggtgttcaatgccaccaggtttgcctctgtctatgcctggaacaggaagaggattagcaactgtgtggctgactactctgtgctctacaactctgcctccttcagcaccttcaagtgttatggagtgagcccaaccaaactgaatgacctgtgtttcaccaatgtctatgctgactcctttgtgattaggggagatgaggtgagacagattgcccctggacaaacaggcaagattgctgactacaactacaaactgcctgatgacttcacaggctgtgtgattgcctggaacagcaacaacctggacagcaaggtgggaggcaactacaactacctctacagactgttcaggaagagcaacctgaaaccatttgagagggacatcagcacagagatttaccaggctggcagcacaccatgtaatggagtggagggcttcaactgttactttccactccaatcctatggcttccaaccaaccaatggagtgggctaccaaccatacagggtggtggtgctgtcctttgaactgctccatgcccctgccacagtgtgtggaccaaagaagagcaccaacctggtgaagaacaagtgtgtgaacttcaacttcaatggactgacaggcacaggagtgctgacagagagcaacaagaagttcctgccattccaacagtttggcagggacattgctgacaccacagatgctgtgagggacccacagaccttggagattctggacatcacaccatgttcctttggaggagtgtctgtgattacacctggcaccaacaccagcaaccaggtggctgtgctctaccaggatgtgaactgtactgaggtgcctgtggctatccatgctgaccaacttacaccaacctggagggtctacagcacaggcagcaatgtgttccagaccagggctggctgtctgattggagcagagcatgtgaacaactcctatgagtgtgacatcccaattggagcaggcatctgtgcctcctaccagacccagaccggtggcggtgggtcgaggtctgtggcaagccagagcatcattgcctacacaatgagtctgggagcagagaactctgtggcttacagcaacaacagcattgccatcccaaccaacttcaccatctctgtgaccacagagattctgcctgtgagtatgaccaagacctctgtggactgtacaatgtatatctgtggagacagcacagagtgtagcaacctgctgctccaatatggctccttctgtacccaacttaacagggctctgacaggcattgctgtggaacaggacaagaacacccaggaggtgtttgcccaggtgaagcagatttacaagacacctccaatcaaggactttggaggcttcaacttcagccagattctgcctgacccaagcaagccaagcaagaggtccttcattgaggacctgctgttcaacaaggtgaccctggctgatgctggcttcatcaagcaatatggagactgtctgggagacattgctgccagggacctgatttgtgcccagaagttcaatggactgacagtgctgcctccactgctgacagatgagatgattgcccaatacacctctgccctgctggctggcaccatcacctctggctggacctttggagcaggagcagccctccaaatcccatttgctatgcagatggcttacaggttcaatggcattggagtgacccagaatgtgctctatgagaaccagaaactgattgccaaccagttcaactctgccattggcaagattcaggactccctgtccagcacagcctctgccctgggcaaactccaagatgtggtgaaccagaatgcccaggctctgaacaccctggtgaagcaactttccagcaactttggagccatctcctctgtgctgaatgacatcctgagcagactggacaaggtggaggctgaggtccagattgacagactgattacaggcagactccaatccctccaaacctatgtgacccaacaacttatcagggctgctgagattagggcatctgccaacctggctgccaccaagatgagtgagtgtgtgctgggacaaagcaagagggtggacttctgtggcaagggctaccacctgatgagttttccacagtctgcccctcatggagtggtgttcctgcatgtgacctatgtgcctgcccaggagaagaacttcaccacagcccctgccatctgccatgatggcaaggctcactttccaagggagggagtgtttgtgagcaatggcacccactggtttgtgacccagaggaacttctatgaaccacagattatcaccacagacaacacctttgtgtctggcaactgtgatgtggtgattggcattgtgaacaacacagtctatgacccactccaacctgaactggactccttcaaggaggaactggacaaatacttcaagaaccacaccagccctgatgtggacctgggagacatctctggcatcaatgcctctgtggtgaacatccagaaggagattgacagactgaatgaggtggctaagaacctgaatgagtccctgattgacctccaagaactgggcaaatatgaacaatacatcaagtggccatgaaaattgatcataatcagccataccacatttgtagaggttttacttgctttaaaaaacctcccacacctccccctgaacctgaaacataaaatgaatgcaattgttgttgttaacttgtttattgcagcttataatggttacaaataaagcaatagcatcacaaatttcacaaataaagcatttttttcactgcattctagttgtggtttgtccaaactcatcaatgtatcttaacgcggatccttcccgctcctcccgtgtgtgactcgcagaacgaatgtgtaggttggctgggtgtggcttattctgcggtggtggatgttatcagggcagcggcgcatgaaggagtttacatagaacccgaagccagggggcgcctggatgctttgagagagtggatatactacaactactacacagagcgatctaagcggcgagaccggagacgcagatctgtttgtcacgcccgcacctggttttgcttcaggaaatatgactacgtccggcgttccatttggcatgacactacgaccaacacgatctcggttgtctcggcgcactccgtacagtagggatcgtctacctccttttgagacagaaacccgcgctaccatactggaggatcatccgctgctgcccgaatgtaacactttgacaatgcacaacgtgagttacgtgcgaggtcttccctgcagtgtgggatttacgctgattcaggaatgggttgttccctgggatatggttctaacgcgggaggagcttgtaatcctgaggaagtgtatgcacgtgtgcctgtgttgtgccaacattgatatcatgacgagcatgatgatccatggttacgagtcctgggctctccactgtcattgttccagtcccggttccctgcagtgtatagccggcgggcaggttttggccagctggtttaggatggtggtggatggcgccatgtttaatcagaggtttatatggtaccgggaggtggtgaattacaacatgccaaaagaggtaatgtttatgtccagcgtgtttatgaggggtcgccacttaatctacctgcgcttgtggtatgatggccacgtgggttctgtggtccccgccatgagctttggatacagcgccttgcactgtgggattttgaacaatattgtggtgctgtgctgcagttactgtgctgatttaagtgagatcagggtgcgctgctgtgcccggaggacaaggcgccttatgctgcgggcggtgcgaatcatcgctgaggagaccactgccatgttgtattcctgcaggacggagcggcggcggcagcagtttattcgcgcgctgctgcagcaccaccgccctatcctgatgcacgattatgactctacccccatgtagaagcttggggatcaattctctagagctcgctgatcagcctcgactgtgccttctagttgccagccatctgttgtttgcccctcccccgtgccttccttgaccctggaaggtgccactcccactgtcctttcctaataaaatgaggaaattgcatcgcattgtctgagtaggtgtcattctattctggggggtggggtggggcaggacagcaagggggaggattgggaagacaatagcaggcatgctggggatgcggtgggctctatggcttctgaggaaattgggcgtggcttaagggtgggaaagaatatataaggtgggggtcttatgtagttttgtatctgttttgcagcagccgccgccgccatgagcaccaactcgtttgatggaagcattgtgagctcatatttgacaacgcgcatgcccccatgggccggggtgcgtcagaatgtgatgggctccagcattgatggtcgccccgtcctgcccgcaaactctactaccttgacctacgagaccgtgtctggaacgccgttggagactgcagcctccgccgccgcttcagccgctgcagccaccgcccgcgggattgtgactgactttgctttcctgagcccgcttgcaagcagtgcagcttcccgttcatccgcccgcgatgacaagttgacggctcttttggcacaattggattctttgacccgggaacttaatgtcgtttctcagcagctgttggatctgcgccagcaggtttctgccctgaaggcttcctcccctcccaatgcggtttaaaacataaataaaaaaccagactctgtttggatttggatcaagcaagtgtcttgctgtctttatttaggggttttgcgcgcgcggtaggcccgggaccagcggtctcggtcgttgagggtcctgtgtattttttccaggacgtggtaaaggtgactctggatgttcagatacatgggcataagcccgtctctggggtggaggtagcaccactgcagagcttcatgctgcggggtggtgttgtagatgatccagtcgtagcaggagcgctgggcgtggtgcctaaaaatgtctttcagtagcaagctgattgccaggggcaggcccttggtgtaagtgtttacaaagcggttaagctgggatgggtgcatacgtggggatatgagatgcatcttggactgtatttttaggttggctatgttcccagccatatccctccggggattcatgttgtgcagaaccaccagcacagtgtatccggtgcacttgggaaatttgtcatgtagcttagaaggaaatgcgtggaagaacttggagacgcccttgtgacctccaagattttccatgcattcgtccataatgatggcaatgggcccacgggcggcggcctgggcgaagatatttctgggatcactaacgtcatagttgtgttccaggatgagatcgtcataggccatttttacaaagcgcgggcggagggtgccagactgcggtataatggttccatccggcccaggggcgtagttaccctcacagatttgcatttcccacgctttgagttcagatggggggatcatgtctacctgcggggcgatgaagaaaacggtttccggggtaggggagatcagctgggaagaaagcaggttcctgagcagctgcgacttaccgcagccggtgggcccgtaaatcacacctattaccgggtgcaactggtagttaagagagctgcagctgccgtcatccctgagcaggggggccacttcgttaagcatgtccctgactcgcatgttttccctgaccaaatccgccagaaggcgctcgccgcccagcgatagcagttcttgcaaggaagcaaagtttttcaacggtttgagaccgtccgccgtaggcatgcttttgagcgtttgaccaagcagttccaggcggtcccacagctcggtcacctgctctacggcatctcgatccagcatatctcctcgtttcgcgggttggggcggctttcgctgtacggcagtagtcggtgctcgtccagacgggccagggtcatgtctttccacgggcgcagggtcctcgtcagcgtagtctgggtcacggtgaaggggtgcgctccgggctgcgcgctggccagggtgcgcttgaggctggtcctgctggtgctgaagcgctgccggtcttcgccctgcgcgtcggccaggtagcatttgaccatggtgtcatagtccagcccctccgcggcgtggcccttggcgcgcagcttgcccttggaggaggcgccgcacgaggggcagtgcagacttttgagggcgtagagcttgggcgcgagaaataccgattccggggagtaggcatccgcgccgcaggccccgcagacggtctcgcattccacgagccaggtgagctctggccgttcggggtcaaaaaccaggtttcccccatgctttttgatgcgtttcttacctctggtttccatgagccggtgtccacgctcggtgacgaaaaggctgtccgtgtccccgtatacagacttgagaggcctgtcctcgagcggtgttccgcggtcctcctcgtatagaaactcggaccactctgagacaaaggctcgcgtccaggccagcacgaaggaggctaagtgggaggggtagcggtcgttgtccactagggggtccactcgctccagggtgtgaagacacatgtcgccctcttcggcatcaaggaaggtgattggtttgtaggtgtaggccacgtgaccgggtgttcctgaaggggggctataaaagggggtgggggcgcgttcgtcctcactctcttccgcatcgctgtctgcgagggccagctgttggggtgagtactccctctgaaaagcgggcatgacttctgcgctaagattgtcagtttccaaaaacgaggaggatttgatattcacctggcccgcggtgatgcctttgagggtggccgcatccatctggtcagaaaagacaatctttttgttgtcaagcttggtggcaaacgacccgtagagggcgttggacagcaacttggcgatggagcgcagggtttggtttttgtcgcgatcggcgcgctccttggccgcgatgtttagctgcacgtattcgcgcgcaacgcaccgccattcgggaaagacggtggtgcgctcgtcgggcaccaggtgcacgcgccaaccgcggttgtgcagggtgacaaggtcaacgctggtggctacctctccgcgtaggcgctcgttggtccagcagaggcggccgcccttgcgcgagcagaatggcggtagggggtctagctgcgtctcgtccggggggtctgcgtccacggtaaagaccccgggcagcaggcgcgcgtcgaagtagtctatcttgcatccttgcaagtctagcgcctgctgccatgcgcgggcggcaagcgcgcgctcgtatgggttgagtgggggaccccatggcatggggtgggtgagcgcggaggcgtacatgccgcaaatgtcgtaaacgtagaggggctctctgagtattccaagatatgtagggtagcatcttccaccgcggatgctggcgcgcacgtaatcgtatagttcgtgcgagggagcgaggaggtcgggaccgaggttgctacgggcgggctgctctgctcggaagactatctgcctgaagatggcatgtgagttggatgatatggttggacgctggaagacgttgaagctggcgtctgtgagacctaccgcgtcacgcacgaaggaggcgtaggagtcgcgcagcttgttgaccagctcggcggtgacctgcacgtctagggcgcagtagtccagggtttccttgatgatgtcatacttatcctgtcccttttttttccacagctcgcggttgaggacaaactcttcgcggtctttccagtactcttggatcggaaacccgtcggcctccgaacggtaagagcctagcatgtagaactggttgacggcctggtaggcgcagcatcccttttctacgggtagcgcgtatgcctgcgcggccttccggagcgaggtgtgggtgagcgcaaaggtgtccctgaccatgactttgaggtactggtatttgaagtcagtgtcgtcgcatccgccctgctcccagagcaaaaagtccgtgcgctttttggaacgcggatttggcagggcgaaggtgacatcgttgaagagtatctttcccgcgcgaggcataaagttgcgtgtgatgcggaagggtcccggcacctcggaacggttgttaattacctgggcggcgagcacgatctcgtcaaagccgttgatgttgtggcccacaatgtaaagttccaagaagcgcgggatgcccttgatggaaggcaattttttaagttcctcgtaggtgagctcttcaggggagctgagcccgtgctctgaaagggcccagtctgcaagatgagggttggaagcgacgaatgagctccacaggtcacgggccattagcatttgcaggtggtcgcgaaaggtcctaaactggcgacctatggccattttttctggggtgatgcagtagaaggtaagcgggtcttgttcccagcggtcccatccaaggttcgcggctaggtctcgcgcggcagtcactagaggctcatctccgccgaacttcatgaccagcatgaagggcacgagctgcttcccaaaggcccccatccaagtataggtctctacatcgtaggtgacaaagagacgctcggtgcgaggatgcgagccgatcgggaagaactggatctcccgccaccaattggaggagtggctattgatgtggtgaaagtagaagtccctgcgacgggccgaacactcgtgctggcttttgtaaaaacgtgcgcagtactggcagcggtgcacgggctgtacatcctgcacgaggttgacctgacgaccgcgcacaaggaagcagagtgggaatttgagcccctcgcctggcgggtttggctggtggtcttctacttcggctgcttgtccttgaccgtctggctgctcgaggggagttacggtggatcggaccaccacgccgcgcgagcccaaagtccagatgtccgcgcgcggcggtcggagcttgatgacaacatcgcgcagatgggagctgtccatggtctggagctcccgcggcgtcaggtcaggcgggagctcctgcaggtttacctcgcatagacgggtcagggcgcgggctagatccaggtgatacctaatttccaggggctggttggtggcggcgtcgatggcttgcaagaggccgcatccccgcggcgcgactacggtaccgcgcggcgggcggtgggccgcgggggtgtccttggatgatgcatctaaaagcggtgacgcgggcgagcccccggaggtagggggggctccggacccgccgggagagggggcaggggcacgtcggcgccgcgcgcgggcaggagctggtgctgcgcgcgtaggttgctggcgaacgcgacgacgcggcggttgatctcctgaatctggcgcctctgcgtgaagacgacgggcccggtgagcttgaacctgaaagagagttcgacagaatcaatttcggtgtcgttgacggcggcctggcgcaaaatctcctgcacgtctcctgagttgtcttgataggcgatctcggccatgaactgctcgatctcttcctcctggagatctccgcgtccggctcgctccacggtggcggcgaggtcgttggaaatgcgggccatgagctgcgagaaggcgttgaggcctccctcgttccagacgcggctgtagaccacgcccccttcggcatcgcgggcgcgcatgaccacctgcgcgagattgagctccacgtgccgggcgaagacggcgtagtttcgcaggcgctgaaagaggtagttgagggtggtggcggtgtgttctgccacgaagaagtacataacccagcgtcgcaacgtggattcgttgatatcccccaaggcctcaaggcgctccatggcctcgtagaagtccacggcgaagttgaaaaactgggagttgcgcgccgacacggttaactcctcctccagaagacggatgagctcggcgacagtgtcgcgcacctcgcgctcaaaggctacaggggcctcttcttcttcttcaatctcctcttccataagggcctccccttcttcttcttctggcggcggtgggggaggggggacacggcggcgacgacggcgcaccgggaggcggtcgacaaagcgctcgatcatctccccgcggcgacggcgcatggtctcggtgacggcgcggccgttctcgcgggggcgcagttggaagacgccgcccgtcatgtcccggttatgggttggcggggggctgccatgcggcagggatacggcgctaacgatgcatctcaacaattgttgtgtaggtactccgccgccgagggacctgagcgagtccgcatcgaccggatcggaaaacctctcgagaaaggcgtctaaccagtcacagtcgcaaggtaggctgagcaccgtggcgggcggcagcgggcggcggtcggggttgtttctggcggaggtgctgctgatgatgtaattaaagtaggcggtcttgagacggcggatggtcgacagaagcaccatgtccttgggtccggcctgctgaatgcgcaggcggtcggccatgccccaggcttcgttttgacatcggcgcaggtctttgtagtagtcttgcatgagcctttctaccggcacttcttcttctccttcctcttgtcctgcatctcttgcatctatcgctgcggcggcggcggagtttggccgtaggtggcgccctcttcctcccatgcgtgtgaccccgaagcccctcatcggctgaagcagggctaggtcggcgacaacgcgctcggctaatatggcctgctgcacctgcgtgagggtagactggaagtcatccatgtccacaaagcggtggtatgcgcccgtgttgatggtgtaagtgcagttggccataacggaccagttaacggtctggtgacccggctgcgagagctcggtgtacctgagacgcgagtaagccctcgagtcaaatacgtagtcgttgcaagtccgcaccaggtactggtatcccaccaaaaagtgcggcggcggctggcggtagaggggccagcgtagggtggccggggctccgggggcgagatcttccaacataaggcgatgatatccgtagatgtacctggacatccaggtgatgccggcggcggtggtggaggcgcgcggaaagtcgcggacgcggttccagatgttgcgcagcggcaaaaagtgctccatggtcgggacgctctggccggtcaggcgcgcgcaatcgttgacgctctagcgtgcaaaaggagagcctgtaagcgggcactcttccgtggtctggtggataaattcgcaagggtatcatggcggacgaccggggttcgagccccgtatccggccgtccgccgtgatccatgcggttaccgcccgcgtgtcgaacccaggtgtgcgacgtcagacaacgggggagtgctccttttggcttccttccaggcgcggcggctgctgcgctagcttttttggccactggccgcgcgcagcgtaagcggttaggctggaaagcgaaagcattaagtggctcgctccctgtagccggagggttattttccaagggttgagtcgcgggacccccggttcgagtctcggaccggccggactgcggcgaacgggggtttgcctccccgtcatgcaagaccccgcttgcaaattcctccggaaacagggacgagccccttttttgcttttcccagatgcatccggtgctgcggcagatgcgcccccctcctcagcagcggcaagagcaagagcagcggcagacatgcagggcaccctcccctcctcctaccgcgtcaggaggggcgacatccgcggttgacgcggcagcagatggtgattacgaacccccgcggcgccgggcccggcactacctggacttggaggagggcgagggcctggcgcggctaggagcgccctctcctgagcggcacccaagggtgcagctgaagcgtgatacgcgtgaggcgtacgtgccgcggcagaacctgtttcgcgaccgcgagggagaggagcccgaggagatgcgggatcgaaagttccacgcagggcgcgagctgcggcatggcctgaatcgcgagcggttgctgcgcgaggaggactttgagcccgacgcgcgaaccgggattagtcccgcgcgcgcacacgtggcggccgccgacctggtaaccgcatacgagcagacggtgaaccaggagattaactttcaaaaaagctttaacaaccacgtgcgtacgcttgtggcgcgcgaggaggtggctataggactgatgcatctgtgggactttgtaagcgcgctggagcaaaacccaaatagcaagccgctcatggcgcagctgttccttatagtgcagcacagcagggacaacgaggcattcagggatgcgctgctaaacatagtagagcccgagggccgctggctgctcgatttgataaacatcctgcagagcatagtggtgcaggagcgcagcttgagcctggctgacaaggtggccgccatcaactattccatgcttagcctgggcaagttttacgcccgcaagatataccataccccttacgttcccatagacaaggaggtaaagatcgaggggttctacatgcgcatggcgctgaaggtgcttaccttgagcgacgacctgggcgtttatcgcaacgagcgcatccacaaggccgtgagcgtgagccggcggcgcgagctcagcgaccgcgagctgatgcacagcctgcaaagggccctggctggcacgggcagcggcgatagagaggccgagtcctactttgacgcgggcgctgacctgcgctgggccccaagccgacgcgccctggaggcagctggggccggacctgggctggcggtggcacccgcgcgcgctggcaacgtcggcggcgtggaggaatatgacgaggacgatgagtacgagccagaggacggcgagtactaagcggtgatgtttctgatcagatgatgcaagacgcaacggacccggcggtgcgggcggcgctgcagagccagccgtccggccttaactccacggacgactggcgccaggtcatggaccgcatcatgtcgctgactgcgcgcaatcctgacgcgttccggcagcagccgcaggccaaccggctctccgcaattctggaagcggtggtcccggcgcgcgcaaaccccacgcacgagaaggtgctggcgatcgtaaacgcgctggccgaaaacagggccatccggcccgacgaggccggcctggtctacgacgcgctgcttcagcgcgtggctcgttacaacagcggcaacgtgcagaccaacctggaccggctggtgggggatgtgcgcgaggccgtggcgcagcgtgagcgcgcgcagcagcagggcaacctgggctccatggttgcactaaacgccttcctgagtacacagcccgccaacgtgccgcggggacaggaggactacaccaactttgtgagcgcactgcggctaatggtgactgagacaccgcaaagtgaggtgtaccagtctgggccagactattttttccagaccagtagacaaggcctgcagaccgtaaacctgagccaggctttcaaaaacttgcaggggctgtggggggtgcgggctcccacaggcgaccgcgcgaccgtgtctagcttgctgacgcccaactcgcgcctgttgctgctgctaatagcgcccttcacggacagtggcagcgtgtcccgggacacatacctaggtcacttgctgacactgtaccgcgaggccataggtcaggcgcatgtggacgagcatactttccaggagattacaagtgtcagccgcgcgctggggcaggaggacacgggcagcctggaggcaaccctaaactacctgctgaccaaccggcggcagaagatcccctcgttgcacagtttaaacagcgaggaggagcgcattttgcgctacgtgcagcagagcgtgagccttaacctgatgcgcgacggggtaacgcccagcgtggcgctggacatgaccgcgcgcaacatggaaccgggcatgtatgcctcaaaccggccgtttatcaaccgcctaatggactacttgcatcgcgcggccgccgtgaaccccgagtatttcaccaatgccatcttgaacccgcactggctaccgccccctggtttctacaccgggggattcgaggtgcccgagggtaacgatggattcctctgggacgacatagacgacagcgtgttttccccgcaaccgcagaccctgctagagttgcaacagcgcgagcaggcagaggcggcgctgcgaaaggaaagcttccgcaggccaagcagcttgtccgatctaggcgctgcggccccgcggtcagatgctagtagcccatttccaagcttgatagggtctcttaccagcactcgcaccacccgcccgcgcctgctgggcgaggaggagtacctaaacaactcgctgctgcagccgcagcgcgaaaaaaacctgcctccggcatttcccaacaacgggatagagagcctagtggacaagatgagtagatggaagacgtacgcgcaggagcacagggacgtgccaggcccgcgcccgcccacccgtcgtcaaaggcacgaccgtcagcggggtctggtgtgggaggacgatgactcggcagacgacagcagcgtcctggatttgggagggagtggcaacccgtttgcgcaccttcgccccaggctggggagaatgttttaaaaaaaaaaaagcatgatgcaaaataaaaaactcaccaaggccatggcaccgagcgttggttttcttgtattccccttagtatgcggcgcgcggcgatgtatgaggaaggtcctcctccctcctacgagagtgtggtgagcgcggcgccagtggcggcggcgctgggttctcccttcgatgctcccctggacccgccgtttgtgcctccgcggtacctgcggcctaccggggggagaaacagcatccgttactctgagttggcacccctattcgacaccacccgtgtgtacctggtggacaacaagtcaacggatgtggcatccctgaactaccagaacgaccacagcaactttctgaccacggtcattcaaaacaatgactacagcccgggggaggcaagcacacagaccatcaatcttgacgaccggtcgcactggggcggcgacctgaaaaccatcctgcataccaacatgccaaatgtgaacgagttcatgtttaccaataagtttaaggcgcgggtgatggtgtcgcgcttgcctactaaggacaatcaggtggagctgaaatacgagtgggtggagttcacgctgcccgagggcaactactccgagaccatgaccatagaccttatgaacaacgcgatcgtggagcactacttgaaagtgggcagacagaacggggttctggaaagcgacatcggggtaaagtttgacacccgcaacttcagactggggtttgaccccgtcactggtcttgtcatgcctggggtatatacaaacgaagccttccatccagacatcattttgctgccaggatgcggggtggacttcacccacagccgcctgagcaacttgttgggcatccgcaagcggcaacccttccaggagggctttaggatcacctacgatgatctggagggtggtaacattcccgcactgttggatgtggacgcctaccaggcgagcttgaaagatgacaccgaacagggcgggggtggcgcaggcggcagcaacagcagtggcagcggcgcggaagagaactccaacgcggcagccgcggcaatgcagccggtggaggacatgaacgatcatgccattcgcggcgacacctttgccacacgggctgaggagaagcgcgctgaggccgaagcagcggccgaagctgccgcccccgctgcgcaacccgaggtcgagaagcctcagaagaaaccggtgatcaaacccctgacagaggacagcaagaaacgcagttacaacctaataagcaatgacagcaccttcacccagtaccgcagctggtaccttgcatacaactacggcgaccctcagaccggaatccgctcatggaccctgctttgcactcctgacgtaacctgcggctcggagcaggtctactggtcgttgccagacatgatgcaagaccccgtgaccttccgctccacgcgccagatcagcaactttccggtggtgggcgccgagctgttgcccgtgcactccaagagcttctacaacgaccaggccgtctactcccaactcatccgccagtttacctctctgacccacgtgttcaatcgctttcccgagaaccagattttggcgcgcccgccagcccccaccatcaccaccgtcagtgaaaacgttcctgctctcacagatcacgggacgctaccgctgcgcaacagcatcggaggagtccagcgagtgaccattactgacgccagacgccgcacctgcccctacgtttacaaggccctgggcatagtctcgccgcgcgtcctatcgagccgcactttttgagcaagcatgtccatccttatatcgcccagcaataacacaggctggggcctgcgcttcccaagcaagatgtttggcggggccaagaagcgctccgaccaacacccagtgcgcgtgcgcgggcactaccgcgcgccctggggcgcgcacaaacgcggccgcactgggcgcaccaccgtcgatgacgccatcgacgcggtggtggaggaggcgcgcaactacacgcccacgccgccaccagtgtccacagtggacgcggccattcagaccgtggtgcgcggagcccggcgctatgctaaaatgaagagacggcggaggcgcgtagcacgtcgccaccgccgccgacccggcactgccgcccaacgcgcggcggcggccctgcttaaccgcgcacgtcgcaccggccgacgggcggccatgcgggccgctcgaaggctggccgcgggtattgtcactgtgccccccaggtccaggcgacgagcggccgccgcagcagccgcggccattagtgctatgactcagggtcgcaggggcaacgtgtattgggtgcgcgactcggttagcggcctgcgcgtgcccgtgcgcacccgccccccgcgcaactagattgcaagaaaaaactacttagactcgtactgttgtatgtatccagcggcggcggcgcgcaacgaagctatgtccaagcgcaaaatcaaagaagagatgctccaggtcatcgcgccggagatctatggccccccgaagaaggaagagcaggattacaagccccgaaagctaaagcgggtcaaaaagaaaaagaaagatgatgatgatgaacttgacgacgaggtggaactgctgcacgctaccgcgcccaggcgacgggtacagtggaaaggtcgacgcgtaaaacgtgttttgcgacccggcaccaccgtagtctttacgcccggtgagcgctccacccgcacctacaagcgcgtgtatgatgaggtgtacggcgacgaggacctgcttgagcaggccaacgagcgcctcggggagtttgcctacggaaagcggcataaggacatgctggcgttgccgctggacgagggcaacccaacacctagcctaaagcccgtaacactgcagcaggtgctgcccgcgcttgcaccgtccgaagaaaagcgcggcctaaagcgcgagtctggtgacttggcacccaccgtgcagctgatggtacccaagcgccagcgactggaagatgtcttggaaaaaatgaccgtggaacctgggctggagcccgaggtccgcgtgcggccaatcaagcaggtggcgccgggactgggcgtgcagaccgtggacgttcagatacccactaccagtagcaccagtattgccaccgccacagagggcatggagacacaaacgtccccggttgcctcagcggtggcggatgccgcggtgcaggcggtcgctgcggccgcgtccaagacctctacggaggtgcaaacggacccgtggatgtttcgcgtttcagccccccggcgcccgcgccgttcgaggaagtacggcgccgccagcgcgctactgcccgaatatgccctacatccttccattgcgcctacccccggctatcgtggctacacctaccgccccagaagacgagcaactacccgacgccgaaccaccactggaacccgccgccgccgtcgccgtcgccagcccgtgctggccccgatttccgtgcgcagggtggctcgcgaaggaggcaggaccctggtgctgccaacagcgcgctaccaccccagcatcgtttaaaagccggtctttgtggttcttgcagatatggccctcacctgccgcctccgtttcccggtgccgggattccgaggaagaatgcaccgtaggaggggcatggccggccacggcctgacgggcggcatgcgtcgtgcgcaccaccggcggcggcgcgcgtcgcaccgtcgcatgcgcggcggtatcctgcccctccttattccactgatcgccgcggcgattggcgccgtgcccggaattgcatccgtggccttgcaggcgcagagacactgattaaaaacaagttgcatgtggaaaaatcaaaataaaaagtctggactctcacgctcgcttggtcctgtaactattttgtagaatggaagacatcaactttgcgtctctggccccgcgacacggctcgcgcccgttcatgggaaactggcaagatatcggcaccagcaatatgagcggtggcgccttcagctggggctcgctgtggagcggcattaaaaatttcggttccaccgttaagaactatggcagcaaggcctggaacagcagcacaggccagatgctgagggataagttgaaagagcaaaatttccaacaaaaggtggtagatggcctggcctctggcattagcggggtggtggacctggccaaccaggcagtgcaaaataagattaacagtaagcttgatccccgccctcccgtagaggagcctccaccggccgtggagacagtgtctccagaggggcgtggcgaaaagcgtccgcgccccgacagggaagaaactctggtgacgcaaatagacgagcctccctcgtacgaggaggcactaaagcaaggcctgcccaccacccgtcccatcgcgcccatggctaccggagtgctgggccagcacacacccgtaacgctggacctgcctccccccgccgacacccagcagaaacctgtgctgccaggcccgaccgccgttgttgtaacccgtcctagccgcgcgtccctgcgccgcgccgccagcggtccgcgatcgttgcggcccgtagccagtggcaactggcaaagcacactgaacagcatcgtgggtctgggggtgcaatccctgaagcgccgacgatgcttctgatagctaacgtgtcgtatgtgtgtcatgtatgcgtccatgtcgccgccagaggagctgctgagccgccgcgcgcccgctttccaagatggctaccccttcgatgatgccgcagtggtcttacatgcacatctcgggccaggacgcctcggagtacctgagccccgggctggtgcagtttgcccgcgccaccgagacgtacttcagcctgaataacaagtttagaaaccccacggtggcgcctacgcacgacgtgaccacagaccggtcccagcgtttgacgctgcggttcatccctgtggaccgtgaggatactgcgtactcgtacaaggcgcggttcaccctagctgtgggtgataaccgtgtgctggacatggcttccacgtactttgacatccgcggcgtgctggacaggggccctacttttaagccctactctggcactgcctacaacgccctggctcccaagggtgccccaaatccttgcgaatgggatgaagctgctactgctcttgaaataaacctagaagaagaggacgatgacaacgaagacgaagtagacgagcaagctgagcagcaaaaaactcacgtatttgggcaggcgccttattctggtataaatattacaaaggagggtattcaaataggtgtcgaaggtcaaacacctaaatatgccgataaaacatttcaacctgaacctcaaataggagaatctcagtggtacgaaacagaaattaatcatgcagctgggagagtcctaaaaaagactaccccaatgaaaccatgttacggttcatatgcaaaacccacaaatgaaaatggagggcaaggcattcttgtaaagcaacaaaatggaaagctagaaagtcaagtggaaatgcaatttttctcaactactgaggcagccgcaggcaatggtgataacttgactcctaaagtggtattgtacagtgaagatgtagatatagaaaccccagacactcatatttcttacatgcccactattaaggaaggtaactcacgagaactaatgggccaacaatctatgcccaacaggcctaattacattgcttttagggacaattttattggtctaatgtattacaacagcacgggtaatatgggtgttctggcgggccaagcatcgcagttgaatgctgttgtagatttgcaagacagaaacacagagctttcataccagcttttgcttgattccattggtgatagaaccaggtacttttctatgtggaatcaggctgttgacagctatgatccagatgttagaattattgaaaatcatggaactgaagatgaacttccaaattactgctttccactgggaggtgtgattaatacagagactcttaccaaggtaaaacctaaaacaggtcaggaaaatggatgggaaaaagatgctacagaattttcagataaaaatgaaataagagttggaaataattttgccatggaaatcaatctaaatgccaacctgtggagaaatttcctgtactccaacatagcgctgtatttgcccgacaagctaaagtacagtccttccaacgtaaaaatttctgataacccaaacacctacgactacatgaacaagcgagtggtggctcccgggctagtggactgctacattaaccttggagcacgctggtcccttgactatatggacaacgtcaacccatttaaccaccaccgcaatgctggcctgcgctaccgctcaatgttgctgggcaatggtcgctatgtgcccttccacatccaggtgcctcagaagttctttgccattaaaaacctccttctcctgccgggctcatacacctacgagtggaacttcaggaaggatgttaacatggttctgcagagctccctaggaaatgacctaagggttgacggagccagcattaagtttgatagcatttgcctttacgccaccttcttccccatggcccacaacaccgcctccacgcttgaggccatgcttagaaacgacaccaacgaccagtcctttaacgactatctctccgccgccaacatgctctaccctatacccgccaacgctaccaacgtgcccatatccatcccctcccgcaactgggcggctttccgcggctgggccttcacgcgccttaagactaaggaaaccccatcactgggctcgggctacgacccttattacacctactctggctctataccctacctagatggaaccttttacctcaaccacacctttaagaaggtggccattacctttgactcttctgtcagctggcctggcaatgaccgcctgcttacccccaacgagtttgaaattaagcgctcagttgacggggagggttacaacgttgcccagtgtaacatgaccaaagactggttcctggtacaaatgctagctaactataacattggctaccagggcttctatatcccagagagctacaaggaccgcatgtactccttctttagaaacttccagcccatgagccgtcaggtggtggatgatactaaatacaaggactaccaacaggtgggcatcctacaccaacacaacaactctggatttgttggctaccttgcccccaccatgcgcgaaggacaggcctaccctgctaacttcccctatccgcttataggcaagaccgcagttgacagcattacccagaaaaagtttctttgcgatcgcaccctttggcgcatcccattctccagtaactttatgtccatgggcgcactcacagacctgggccaaaaccttctctacgccaactccgcccacgcgctagacatgacttttgaggtggatcccatggacgagcccacccttctttatgttttgtttgaagtctttgacgtggtccgtgtgcaccagccgcaccgcggcgtcatcgaaaccgtgtacctgcgcacgcccttctcggccggcaacgccacaacataaagaagcaagcaacatcaacaacagctgccgccatgggctccagtgagcaggaactgaaagccattgtcaaagatcttggttgtgggccatattttttgggcacctatgacaagcgctttccaggctttgtttctccacacaagctcgcctgcgccatagtcaatacggccggtcgcgagactgggggcgtacactggatggcctttgcctggaacccgcactcaaaaacatgctacctctttgagccctttggcttttctgaccagcgactcaagcaggtttaccagtttgagtacgagtcactcctgcgccgtagcgccattgcttcttcccccgaccgctgtataacgctggaaaagtccacccaaagcgtacaggggcccaactcggccgcctgtggactattctgctgcatgtttctccacgcctttgccaactggccccaaactcccatggatcacaaccccaccatgaaccttattaccggggtacccaactccatgctcaacagtccccaggtacagcccaccctgcgtcgcaaccaggaacagctctacagcttcctggagcgccactcgccctacttccgcagccacagtgcgcagattaggagcgccacttctttttgtcacttgaaaaacatgtaaaaataatgtactagagacactttcaataaaggcaaatgcttttatttgtacactctcgggtgattatttacccccacccttgccgtctgcgccgtttaaaaatcaaaggggttctgccgcgcatcgctatgcgccactggcagggacacgttgcgatactggtgtttagtgctccacttaaactcaggcacaaccatccgcggcagctcggtgaagttttcactccacaggctgcgcaccatcaccaacgcgtttagcaggtcgggcgccgatatcttgaagtcgcagttggggcctccgccctgcgcgcgcgagttgcgatacacagggttgcagcactggaacactatcagcgccgggtggtgcacgctggccagcacgctcttgtcggagatcagatccgcgtccaggtcctccgcgttgctcagggcgaacggagtcaactttggtagctgccttcccaaaaagggcgcgtgcccaggctttgagttgcactcgcaccgtagtggcatcaaaaggtgaccgtgcccggtctgggcgttaggatacagcgcctgcataaaagccttgatctgcttaaaagccacctgagcctttgcgccttcagagaagaacatgccgcaagacttgccggaaaactgattggccggacaggccgcgtcgtgcacgcagcaccttgcgtcggtgttggagatctgcaccacatttcggccccaccggttcttcacgatcttggccttgctagactgctccttcagcgcgcgctgcccgttttcgctcgtcacatccatttcaatcacgtgctccttatttatcataatgcttccgtgtagacacttaagctcgccttcgatctcagcgcagcggtgcagccacaacgcgcagcccgtgggctcgtgatgcttgtaggtcacctctgcaaacgactgcaggtacgcctgcaggaatcgccccatcatcgtcacaaaggtcttgttgctggtgaaggtcagctgcaacccgcggtgctcctcgttcagccaggtcttgcatacggccgccagagcttccacttggtcaggcagtagtttgaagttcgcctttagatcgttatccacgtggtacttgtccatcagcgcgcgcgcagcctccatgcccttctcccacgcagacacgatcggcacactcagcgggttcatcaccgtaatttcactttccgcttcgctgggctcttcctcttcctcttgcgtccgcataccacgcgccactgggtcgtcttcattcagccgccgcactgtgcgcttacctcctttgccatgcttgattagcaccggtgggttgctgaaacccaccatttgtagcgccacatcttctctttcttcctcgctgtccacgattacctctggtgatggcgggcgctcgggcttgggagaagggcgcttctttttcttcttgggcgcaatggccaaatccgccgccgaggtcgatggccgcgggctgggtgtgcgcggcaccagcgcgtcttgtgatgagtcttcctcgtcctcggactcgatacgccgcctcatccgcttttttgggggcgcccggggaggcggcggcgacggggacggggacgacacgtcctccatggttgggggacgtcgcgccgcaccgcgtccgcgctcgggggtggtttcgcgctgctcctcttcccgactggccatttccttctcctataggcagaaaaagatcatggagtcagtcgagaagaaggacagcctaaccgccccctctgagttcgccaccaccgcctccaccgatgccgccaacgcgcctaccaccttccccgtcgaggcacccccgcttgaggaggaggaagtgattatcgagcaggacccaggttttgtaagcgaagacgacgaggaccgctcagtaccaacagaggataaaaagcaagaccaggacaacgcagaggcaaacgaggaacaagtcgggcggggggacgaaaggcatggcgactacctagatgtgggagacgacgtgctgttgaagcatctgcagcgccagtgcgccattatctgcgacgcgttgcaagagcgcagcgatgtgcccctcgccatagcggatgtcagccttgcctacgaacgccacctattctcaccgcgcgtaccccccaaacgccaagaaaacggcacatgcgagcccaacccgcgcctcaacttctaccccgtatttgccgtgccagaggtgcttgccacctatcacatctttttccaaaactgcaagatacccctatcctgccgtgccaaccgcagccgagcggacaagcagctggccttgcggcagggcgctgtcatacctgatatcgcctcgctcaacgaagtgccaaaaatctttgagggtcttggacgcgacgagaagcgcgcggcaaacgctctgcaacaggaaaacagcgaaaatgaaagtcactctggagtgttggtggaactcgagggtgacaacgcgcgcctagccgtactaaaacgcagcatcgaggtcacccactttgcctacccggcacttaacctaccccccaaggtcatgagcacagtcatgagtgagctgatcgtgcgccgtgcgcagcccctggagagggatgcaaatttgcaagaacaaacagaggagggcctacccgcagttggcgacgagcagctagcgcgctggcttcaaacgcgcgagcctgccgacttggaggagcgacgcaaactaatgatggccgcagtgctcgttaccgtggagcttgagtgcatgcagcggttctttgctgacccggagatgcagcgcaagctagaggaaacattgcactacacctttcgacagggctacgtacgccaggcctgcaagatctccaacgtggagctctgcaacctggtctcctaccttggaattttgcacgaaaaccgccttgggcaaaacgtgcttcattccacgctcaagggcgaggcgcgccgcgactacgtccgcgactgcgtttacttatttctatgctacacctggcagacggccatgggcgtttggcagcagtgcttggaggagtgcaacctcaaggagctgcagaaactgctaaagcaaaacttgaaggacctatggacggccttcaacgagcgctccgtggccgcgcacctggcggacatcattttccccgaacgcctgcttaaaaccctgcaacagggtctgccagacttcaccagtcaaagcatgttgcagaactttaggaactttatcctagagcgctcaggaatcttgcccgccacctgctgtgcacttcctagcgactttgtgcccattaagtaccgcgaatgccctccgccgctttggggccactgctaccttctgcagctagccaactaccttgcctaccactctgacataatggaagacgtgagcggtgacggtctactggagtgtcactgtcgctgcaacctatgcaccccgcaccgctccctggtttgcaattcgcagctgcttaacgaaagtcaaattatcggtacctttgagctgcagggtccctcgcctgacgaaaagtccgcggctccggggttgaaactcactccggggctgtggacgtcggcttaccttcgcaaatttgtacctgaggactaccacgcccacgagattaggttctacgaagaccaatcccgcccgcctaatgcggagcttaccgcctgcgtcattacccagggccacattcttggccaattgcaagccatcaacaaagcccgccaagagtttctgctacgaaagggacggggggtttacttggacccccagtccggcgaggagctcaacccaatccccccgccgccgcagccctatcagcagcagccgcgggcccttgcttcccaggatggcacccaaaaagaagctgcagctgccgccgccacccacggacgaggaggaatactgggacagtcaggcagaggaggttttggacgaggaggaggaggacatgatggaagactgggagagcctagacgaggaagcttccgaggtcgaagaggtgtcagacgaaacaccgtcaccctcggtcgcattcccctcgccggcgccccagaaatcggcaaccggttccagcatggctacaacctccgctcctcaggcgccgccggcactgcccgttcgccgacccaaccgtagatgggacaccactggaaccagggccggtaagtccaagcagccgccgccgttagcccaagagcaacaacagcgccaaggctaccgctcatggcgcgggcacaagaacgccatagttgcttgcttgcaagactgtgggggcaacatctccttcgcccgccgctttcttctctaccatcacggcgtggccttcccccgtaacatcctgcattactaccgtcatctctacagcccatactgcaccggcggcagcggcagcaacagcagcggccacacagaagcaaaggcgaccggatagcaagactctgacaaagcccaagaaatccacagcggcggcagcagcaggaggaggagcgctgcgtctggcgcccaacgaacccgtatcgacccgcgagcttagaaacaggatttttcccactctgtatgctatatttcaacagagcaggggccaagaacaagagctgaaaataaaaaacaggtctctgcgatccctcacccgcagctgcctgtatcacaaaagcgaagatcagcttcggcgcacgctggaagacgcggaggctctcttcagtaaatactgcgcgctgactcttaaggactagtttcgcgccctttctcaaatttaagcgcgaaaactacgtcatctccagcggccacacccggcgccagcacctgttgtcagcgccattatgagcaaggaaattcccacgccctacatgtggagttaccagccacaaatgggacttgcggctggagctgcccaagactactcaacccgaataaactacatgagcgcgggaccccacatgatatcccgggtcaacggaatacgcgcccaccgaaaccgaattctcctggaacaggcggctattaccaccacacctcgtaataaccttaatccccgtagttggcccgctgccctggtgtaccaggaaagtcccgctcccaccactgtggtacttcccagagacgcccaggccgaagttcagatgactaactcaggggcgcagcttgcgggcggctttcgtcacagggtgcggtcgcccgggcagggtataactcacctgacaatcagagggcgaggtattcagctcaacgacgagtcggtgagctcctcgcttggtctccgtccggacgggacatttcagatcggcggcgccggccgctcttcattcacgcctcgtcaggcaatcctaactctgcagacctcgtcctctgagccgcgctctggaggcattggaactctgcaatttattgaggagtttgtgccatcggtctactttaaccccttctcgggacctcccggccactatccggatcaatttattcctaactttgacgcggtaaaggactcggcggacggctacgactgaatgttaagtggagaggcagagcaactgcgcctgaaacacctggtccactgtcgccgccacaagtgctttgcccgcgactccggtgagttttgctactttgaattgcccgaggatcatatcgagggcccggcgcacggcgtccggcttaccgcccagggagagcttgcccgtagcctgattcgggagtttacccagcgccccctgctagttgagcgggacaggggaccctgtgttctcactgtgatttgcaactgtcctaaccctggattacatcaagatcctctagttaatgtcaggtcgcctaagtcgattaactagagtacccggggatcttattccctttaactaataaaaaaaaataataaagcatcacttacttaaaatcagttagcaaatttctgtccagtttattcagcagcacctccttgccctcctcccagctctggtattgcagcttcctcctggctgcaaactttctccacaatctaaatggaatgtcagtttcctcctgttcctgtccatccgcacccactatcttcatgttgttgcagatgaagcgcgcaagaccgtctgaagataccttcaaccccgtgtatccatatgacacggaaaccggtcctccaactgtgccttttcttactcctccctttgtatcccccaatgggtttcaagagagtccccctggggtactctctttgcgcctatccgaacctctagttacctccaatggcatgcttgcgctcaaaatgggcaacggcctctctctggacgaggccggcaaccttacctcccaaaatgtaaccactgtgagcccacctctcaaaaaaaccaagtcaaacataaacctggaaatatctgcacccctcacagttacctcagaagccctaactgtggctgccgccgcacctctaatggtcgcgggcaacacactcaccatgcaatcacaggccccgctaaccgtgcacgactccaaacttagcattgccacccaaggacccctcacagtgtcagaaggaaagctagccctgcaaacatcaggccccctcaccaccaccgatagcagtacccttactatcactgcctcaccccctctaactactgccactggtagcttgggcattgacttgaaagagcccatttatacacaaaatggaaaactaggactaaagtacggggctcctttgcatgtaacagacgacctaaacactttgaccgtagcaactggtccaggtgtgactattaataatacttccttgcaaactaaagttactggagccttgggttttgattcacaaggcaatatgcaacttaatgtagcaggaggactaaggattgattctcaaaacagacgccttatacttgatgttagttatccgtttgatgctcaaaaccaactaaatctaagactaggacagggccctctttttataaactcagcccacaacttggatattaactacaacaaaggcctttacttgtttacagcttcaaacaattccaaaaagcttgaggttaacctaagcactgccaaggggttgatgtttgacgctacagccatagccattaatgcaggagatgggcttgaatttggttcacctaatgcaccaaacacaaatcccctcaaaacaaaaattggccatggcctagaatttgattcaaacaaggctatggttcctaaactaggaactggccttagttttgacagcacaggtgccattacagtaggaaacaaaaataatgataagctaactttgtggaccggaataaaccctccacctaactgtcaaattgtggaaaacactaatacaaatgatggcaaacttactttagtattagtaaaaaatggagggcttgttaatggctacgtgtctctagttggtgtatcagacactgtgaaccaaatgttcacacaaaagacagcaaacatccaattaagattatattttgactcttctggaaatctattaactgaggaatcagacttaaaaattccacttaaaaataaatcttctacagcgaccagtgaaactgtagccagcagcaaagcctttatgccaagtactacagcttatcccttcaacaccactactagggatagtgaaaactacattcatggaatatgttactacatgactagttatgatagaagtctatttcccttgaacatttctataatgctaaacagccgtatgatttcttccaatgttgcctatgccatacaatttgaatggaatctaaatgcaagtgaatctccagaaagcaacatagctacgctgaccacatccccctttttcttttcttacattacagaagacgacaactaaagaatcgtttgtgttatgtttcaacgtgtttatttttcaattgcagaaaatttcaagtcatttttcattcagtagtatagccccaccaccacatagcttatacagatcaccgtaccttaatcaaactcacagaaccctagtattcaacctgccacctccctcccaacacacagagtacacagtcctttctccccggctggccttaaaaagcatcatatcatgggtaacagacatattcttaggtgttatattccacacggtttcctgtcgagccaaacgctcatcagtgatattaataaactccccgggcagctcacttaagttcatgtcgctgtccagctgctgagccacaggctgctgtccaacttgcggttgcttaacgggcggcgaaggagaagtccacgcctacatgggggtagagtcataatcgtgcatcaggatagggcggtggtgctgcagcagcgcgcgaataaactgctgccgccgccgctccgtcctgcaggaatacaacatggcagtggtctcctcagcgatgattcgcaccgcccgcagcataaggcgccttgtcctccgggcacagcagcgcaccctgatctcacttaaatcagcacagtaactgcagcacagcaccacaatattgttcaaaatcccacagtgcaaggcgctgtatccaaagctcatggcggggaccacagaacccacgtggccatcataccacaagcgcaggtagattaagtggcgacccctcataaacacgctggacataaacattacctcttttggcatgttgtaattcaccacctcccctctgattaaacatggcgccatccaccaccatcctaaaccagctggccaaaacctgcccgccggctatacactgcagggaaccgggactggaacaatgacagtggagagcccaggactcgtaaccatggatcatcatgctcgtcatgatatcaatgttggcacaacacaggcacacgtgcatacacttcctcaggattacaagctcctcccgcgttagaaccatatcccagggaacaacccattcctgaatcagcgtaaatcccacactgcagggaagacctcgcacgtaactcacgttgtgcattgtcaaagtgttacattcgggcagcagcggatgatcctccagtatggtagcgcgggtttctgtctcaaaaggaggtagacgatccctactgtacggagtgcgccgagacaaccgagatcgtgttggtcgtagtgtcatgccaaatggaacgccggacgtagtcatatttcctgaagcaaaaccaggtgcgggcgtgacaaacagatctgcgtctccggtctcgccgcttagatcgctctgtgtagtagttgtagtatatccactctctcaaagcatccaggcgccccctggcttcgggttctatgtaaactccttcatgcgccgctgccctgataacatccaccaccgcagaataagccacacccagccaacctacacattcgttctgcgagtcacacacgggaggagcgggaagagctggaagaaccatgtttttttttttattccaaaagattatccaaaacctcaaaatgaagatctattaagtgaacgcgctcccctccggtggcgtggtcaaactctacagccaaagaacagataatggcatttgtaagatgttgcacaatggcttccaaaaggcaaacggccctcacgtccaagtggacgtaaaggctaaacccttcagggtgaatctcctctataaacattccagcaccttcaaccatgcccaaataattctcatctcgccaccttctcaatatatctctaagcaaatcccgaatattaagtccggccattgtaaaaatctgctccagagcgccctccaccttcagcctcaagcagcgaatcatgattgcaaaaattcaggttcctcacagacctgtataagattcaaaagcggaacattaacaaaaataccgcgatcccgtaggtcccttcgcagggccagctgaacataatcgtgcaggtctgcacggaccagcgcggccacttccccgccaggaaccatgacaaaagaacccacactgattatgacacgcatactcggagctatgctaaccagcgtagccccgatgtaagcttgttgcatgggcggcgatataaaatgcaaggtgctgctcaaaaaatcaggcaaagcctcgcgcaaaaaagaaagcacatcgtagtcatgctcatgcagataaaggcaggtaagctccggaaccaccacagaaaaagacaccatttttctctcaaacatgtctgcgggtttctgcataaacacaaaataaaataacaaaaaaacatttaaacattagaagcctgtcttacaacaggaaaaacaacccttataagcataagacggactacggccatgccggcgtgaccgtaaaaaaactggtcaccgtgattaaaaagcaccaccgacagctcctcggtcatgtccggagtcataatgtaagactcggtaaacacatcaggttgattcacatcggtcagtgctaaaaagcgaccgaaatagcccgggggaatacatacccgcaggcgtagagacaacattacagcccccataggaggtataacaaaattaataggagagaaaaacacataaacacctgaaaaaccctcctgcctaggcaaaatagcaccctcccgctccagaacaacatacagcgcttccacagcggcagccataacagtcagccttaccagtaaaaaagaaaacctattaaaaaaacaccactcgacacggcaccagctcaatcagtcacagtgtaaaaaagggccaagtgcagagcgagtatatataggactaaaaaatgacgtaacggttaaagtccacaaaaaacacccagaaaaccgcacgcgaacctacgcccagaaacgaaagccaaaaaacccacaacttcctcaaatcgtcacttccgttttcccacgttacgtcacttcccattttaagaaaactacaattcccaacacatacaagttactccgccctaaaacctacgtcacccgccccgttcccacgccccgcgccacgtcacaaactccaccccctcattatcatattggcttcaatccaaaataaggtatattattgatgatg

SEQ ID NO: 21 - DNA, 36401 bp, Artificial Sequence
  pAdk35F2-Spike/E4orf6(-0.5kb)-pE4dl355(E4re#16)
ttaattaacatcatcaataatataccttattttggattgaagccaatatgataatgagggggtggagtttgtgacgtggcgcggggcgtgggaacggggcgggtgacgtagtagtgtggcggaagtgtgatgttgcaagtgtggcggaacacatgtaagcgacggatgtggcaaaagtgacgtttttggtgtgcgccggtgtacacaggaagtgacaattttcgcgcggttttaggcggatgttgtagtaaatttgggcgtaaccgagtaagatttggccattttcgcgggaaaactgaataagaggaagtgaaatctgaataattttgtgttactcatagcgcgtaataatttctgtaatagtaatcaattacggggtcattagttcatagcccatatatggagttccgcgttacataacttacggtaaatggcccgcctggctgaccgcccaacgacccccgcccattgacgtcaataatgacgtatgttcccatagtaacgccaatagggactttccattgacgtcaatgggtggagtatttacggtaaactgcccacttggcagtacatcaagtgtatcatatgccaagtacgccccctattgacgtcaatgacggtaaatggcccgcctggcattatgcccagtacatgaccttatgggactttcctacttggcagtacatctacgtattagtcatcgctattaccatggtgatgcggttttggcagtacatcaatgggcgtggatagcggtttgactcacggggatttccaagtctccaccccattgacgtcaatgggagtttgttttggcaccaaaatcaacgggactttccaaaatgtcgtaacaactccgccccattgacgcaaatgggcggtaggcgtgtacggtgggaggtctatataagcagagctctccctatcagtgatagagatctccctatcagtgatagagatcgtcgacgagctcgtttagtgaaccgtcagatcgcctggagacgccatccacgctgttttgacctccatagaagacaccgggaccgatccagcctccgatttgccaccatgtttgtgttcctggtgctgctgccactggtgtccagccagtgtgtgaacctgaccaccaggacccaacttcctcctgcctacaccaactccttcaccaggggagtctactaccctgacaaggtgttcaggtcctctgtgctgcacagcacccaggacctgttcctgccattcttcagcaatgtgacctggttccatgccatccatgtgtctggcaccaatggcaccaagaggtttgacaaccctgtgctgccattcaatgatggagtctactttgccagcacagagaagagcaacatcatcaggggctggatttttggcaccaccctggacagcaagacccagtccctgctgattgtgaacaatgccaccaatgtggtgattaaggtgtgtgagttccagttctgtaatgacccattcctgggagtctactaccacaagaacaacaagtcctggatggagtctgagttcagggtctactcctctgccaacaactgtacctttgaatatgtgagccaaccattcctgatggacttggagggcaagcagggcaacttcaagaacctgagggagtttgtgttcaagaacattgatggctacttcaagatttacagcaaacacacaccaatcaacctggtgagggacctgccacagggcttctctgccttggaaccactggtggacctgccaattggcatcaacatcaccaggttccagaccctgctggctctgcacaggtcctacctgacacctggagactcctcctctggctggacagcaggagcagcagcctactatgtgggctacctccaaccaaggaccttcctgctgaaatacaatgagaatggcaccatcacagatgctgtggactgtgccctggacccactgtctgagaccaagtgtaccctgaaatccttcacagtggagaagggcatctaccagaccagcaacttcagggtccaaccaacagagagcattgtgaggtttccaaacatcaccaacctgtgtccatttggagaggtgttcaatgccaccaggtttgcctctgtctatgcctggaacaggaagaggattagcaactgtgtggctgactactctgtgctctacaactctgcctccttcagcaccttcaagtgttatggagtgagcccaaccaaactgaatgacctgtgtttcaccaatgtctatgctgactcctttgtgattaggggagatgaggtgagacagattgcccctggacaaacaggcaagattgctgactacaactacaaactgcctgatgacttcacaggctgtgtgattgcctggaacagcaacaacctggacagcaaggtgggaggcaactacaactacctctacagactgttcaggaagagcaacctgaaaccatttgagagggacatcagcacagagatttaccaggctggcagcacaccatgtaatggagtggagggcttcaactgttactttccactccaatcctatggcttccaaccaaccaatggagtgggctaccaaccatacagggtggtggtgctgtcctttgaactgctccatgcccctgccacagtgtgtggaccaaagaagagcaccaacctggtgaagaacaagtgtgtgaacttcaacttcaatggactgacaggcacaggagtgctgacagagagcaacaagaagttcctgccattccaacagtttggcagggacattgctgacaccacagatgctgtgagggacccacagaccttggagattctggacatcacaccatgttcctttggaggagtgtctgtgattacacctggcaccaacaccagcaaccaggtggctgtgctctaccaggatgtgaactgtactgaggtgcctgtggctatccatgctgaccaacttacaccaacctggagggtctacagcacaggcagcaatgtgttccagaccagggctggctgtctgattggagcagagcatgtgaacaactcctatgagtgtgacatcccaattggagcaggcatctgtgcctcctaccagacccagaccggtggcggtgggtcgaggtctgtggcaagccagagcatcattgcctacacaatgagtctgggagcagagaactctgtggcttacagcaacaacagcattgccatcccaaccaacttcaccatctctgtgaccacagagattctgcctgtgagtatgaccaagacctctgtggactgtacaatgtatatctgtggagacagcacagagtgtagcaacctgctgctccaatatggctccttctgtacccaacttaacagggctctgacaggcattgctgtggaacaggacaagaacacccaggaggtgtttgcccaggtgaagcagatttacaagacacctccaatcaaggactttggaggcttcaacttcagccagattctgcctgacccaagcaagccaagcaagaggtccttcattgaggacctgctgttcaacaaggtgaccctggctgatgctggcttcatcaagcaatatggagactgtctgggagacattgctgccagggacctgatttgtgcccagaagttcaatggactgacagtgctgcctccactgctgacagatgagatgattgcccaatacacctctgccctgctggctggcaccatcacctctggctggacctttggagcaggagcagccctccaaatcccatttgctatgcagatggcttacaggttcaatggcattggagtgacccagaatgtgctctatgagaaccagaaactgattgccaaccagttcaactctgccattggcaagattcaggactccctgtccagcacagcctctgccctgggcaaactccaagatgtggtgaaccagaatgcccaggctctgaacaccctggtgaagcaactttccagcaactttggagccatctcctctgtgctgaatgacatcctgagcagactggacaaggtggaggctgaggtccagattgacagactgattacaggcagactccaatccctccaaacctatgtgacccaacaacttatcagggctgctgagattagggcatctgccaacctggctgccaccaagatgagtgagtgtgtgctgggacaaagcaagagggtggacttctgtggcaagggctaccacctgatgagttttccacagtctgcccctcatggagtggtgttcctgcatgtgacctatgtgcctgcccaggagaagaacttcaccacagcccctgccatctgccatgatggcaaggctcactttccaagggagggagtgtttgtgagcaatggcacccactggtttgtgacccagaggaacttctatgaaccacagattatcaccacagacaacacctttgtgtctggcaactgtgatgtggtgattggcattgtgaacaacacagtctatgacccactccaacctgaactggactccttcaaggaggaactggacaaatacttcaagaaccacaccagccctgatgtggacctgggagacatctctggcatcaatgcctctgtggtgaacatccagaaggagattgacagactgaatgaggtggctaagaacctgaatgagtccctgattgacctccaagaactgggcaaatatgaacaatacatcaagtggccatgaaaattgatcataatcagccataccacatttgtagaggttttacttgctttaaaaaacctcccacacctccccctgaacctgaaacataaaatgaatgcaattgttgttgttaacttgtttattgcagcttataatggttacaaataaagcaatagcatcacaaatttcacaaataaagcatttttttcactgcattctagttgtggtttgtccaaactcatcaatgtatcttaacgcggatcatggttgaaggtgctggaatgtttatagaggagattcaccctgaagggtttagcctttacgtccacttggacgtgagggccgtttgccttttggaagccattgtgcaacatcttacaaatgccattatctgttctttggctgtagagtttgaccacgccaccggaggggagcgcgttcacttaatagatcttcattttgaggttttggataatcttttggaataaaaaaaaaaacatggttcttccagctcttcccgctcctcccgtgtgtgactcgcagaacgaatgtgtaggttggctgggtgtggcttattctgcggtggtggatgttatcagggcagcggcgcatgaaggagtttacatagaacccgaagccagggggcgcctggatgctttgagagagtggatatactacaactactacacagagcgatctaagcggcgagaccggagacgcagatctgtttgtcacgcccgcacctggttttgcttcaggaaatatgactacgtccggcgttccatttggcatgacactacgaccaacacgatctcggttgtctcggcgcactccgtacagtagggatcgtctacctccttttgagacagaaacccgcgctaccatactggaggatcatccgctgctgcccgaatgtaacactttgacaatgcacaacgtgagttacgtgcgaggtcttccctgcagtgtgggatttacgctgattcaggaatgggttgttccctgggatatggttctaacgcgggaggagcttgtaatcctgaggaagtgtatgcacgtgtgcctgtgttgtgccaacattgatatcatgacgagcatgatgatccatggttacgagtcctgggctctccactgtcattgttccagtcccggttccctgcagtgtatagccggcgggcaggttttggccagctggtttaggatggtggtggatggcgccatgtttaatcagaggtttatatggtaccgggaggtggtgaattacaacatgccaaaagaggtaatgtttatgtccagcgtgtttatgaggggtcgccacttaatctacctgcgcttgtggtatgatggccacgtgggttctgtggtccccgccatgagctttggatacagcgccttgcactgtgggattttgaacaatattgtggtgctgtgctgcagttactgtgctgatttaagtgagatcagggtgcgctgctgtgcccggaggacaaggcgccttatgctgcgggcggtgcgaatcatcgctgaggagaccactgccatgttgtattcctgcaggacggagcggcggcggcagcagtttattcgcgcgctgctgcagcaccaccgccctatcctgatgcacgattatgactctacccccatgtagaagcttggggatcaattctctagagctcgctgatcagcctcgactgtgccttctagttgccagccatctgttgtttgcccctcccccgtgccttccttgaccctggaaggtgccactcccactgtcctttcctaataaaatgaggaaattgcatcgcattgtctgagtaggtgtcattctattctggggggtggggtggggcaggacagcaagggggaggattgggaagacaatagcaggcatgctggggatgcggtgggctctatggcttctgaggaaattgggcgtggcttaagggtgggaaagaatatataaggtgggggtcttatgtagttttgtatctgttttgcagcagccgccgccgccatgagcaccaactcgtttgatggaagcattgtgagctcatatttgacaacgcgcatgcccccatgggccggggtgcgtcagaatgtgatgggctccagcattgatggtcgccccgtcctgcccgcaaactctactaccttgacctacgagaccgtgtctggaacgccgttggagactgcagcctccgccgccgcttcagccgctgcagccaccgcccgcgggattgtgactgactttgctttcctgagcccgcttgcaagcagtgcagcttcccgttcatccgcccgcgatgacaagttgacggctcttttggcacaattggattctttgacccgggaacttaatgtcgtttctcagcagctgttggatctgcgccagcaggtttctgccctgaaggcttcctcccctcccaatgcggtttaaaacataaataaaaaaccagactctgtttggatttggatcaagcaagtgtcttgctgtctttatttaggggttttgcgcgcgcggtaggcccgggaccagcggtctcggtcgttgagggtcctgtgtattttttccaggacgtggtaaaggtgactctggatgttcagatacatgggcataagcccgtctctggggtggaggtagcaccactgcagagcttcatgctgcggggtggtgttgtagatgatccagtcgtagcaggagcgctgggcgtggtgcctaaaaatgtctttcagtagcaagctgattgccaggggcaggcccttggtgtaagtgtttacaaagcggttaagctgggatgggtgcatacgtggggatatgagatgcatcttggactgtatttttaggttggctatgttcccagccatatccctccggggattcatgttgtgcagaaccaccagcacagtgtatccggtgcacttgggaaatttgtcatgtagcttagaaggaaatgcgtggaagaacttggagacgcccttgtgacctccaagattttccatgcattcgtccataatgatggcaatgggcccacgggcggcggcctgggcgaagatatttctgggatcactaacgtcatagttgtgttccaggatgagatcgtcataggccatttttacaaagcgcgggcggagggtgccagactgcggtataatggttccatccggcccaggggcgtagttaccctcacagatttgcatttcccacgctttgagttcagatggggggatcatgtctacctgcggggcgatgaagaaaacggtttccggggtaggggagatcagctgggaagaaagcaggttcctgagcagctgcgacttaccgcagccggtgggcccgtaaatcacacctattaccgggtgcaactggtagttaagagagctgcagctgccgtcatccctgagcaggggggccacttcgttaagcatgtccctgactcgcatgttttccctgaccaaatccgccagaaggcgctcgccgcccagcgatagcagttcttgcaaggaagcaaagtttttcaacggtttgagaccgtccgccgtaggcatgcttttgagcgtttgaccaagcagttccaggcggtcccacagctcggtcacctgctctacggcatctcgatccagcatatctcctcgtttcgcgggttggggcggctttcgctgtacggcagtagtcggtgctcgtccagacgggccagggtcatgtctttccacgggcgcagggtcctcgtcagcgtagtctgggtcacggtgaaggggtgcgctccgggctgcgcgctggccagggtgcgcttgaggctggtcctgctggtgctgaagcgctgccggtcttcgccctgcgcgtcggccaggtagcatttgaccatggtgtcatagtccagcccctccgcggcgtggcccttggcgcgcagcttgcccttggaggaggcgccgcacgaggggcagtgcagacttttgagggcgtagagcttgggcgcgagaaataccgattccggggagtaggcatccgcgccgcaggccccgcagacggtctcgcattccacgagccaggtgagctctggccgttcggggtcaaaaaccaggtttcccccatgctttttgatgcgtttcttacctctggtttccatgagccggtgtccacgctcggtgacgaaaaggctgtccgtgtccccgtatacagacttgagaggcctgtcctcgagcggtgttccgcggtcctcctcgtatagaaactcggaccactctgagacaaaggctcgcgtccaggccagcacgaaggaggctaagtgggaggggtagcggtcgttgtccactagggggtccactcgctccagggtgtgaagacacatgtcgccctcttcggcatcaaggaaggtgattggtttgtaggtgtaggccacgtgaccgggtgttcctgaaggggggctataaaagggggtgggggcgcgttcgtcctcactctcttccgcatcgctgtctgcgagggccagctgttggggtgagtactccctctgaaaagcgggcatgacttctgcgctaagattgtcagtttccaaaaacgaggaggatttgatattcacctggcccgcggtgatgcctttgagggtggccgcatccatctggtcagaaaagacaatctttttgttgtcaagcttggtggcaaacgacccgtagagggcgttggacagcaacttggcgatggagcgcagggtttggtttttgtcgcgatcggcgcgctccttggccgcgatgtttagctgcacgtattcgcgcgcaacgcaccgccattcgggaaagacggtggtgcgctcgtcgggcaccaggtgcacgcgccaaccgcggttgtgcagggtgacaaggtcaacgctggtggctacctctccgcgtaggcgctcgttggtccagcagaggcggccgcccttgcgcgagcagaatggcggtagggggtctagctgcgtctcgtccggggggtctgcgtccacggtaaagaccccgggcagcaggcgcgcgtcgaagtagtctatcttgcatccttgcaagtctagcgcctgctgccatgcgcgggcggcaagcgcgcgctcgtatgggttgagtgggggaccccatggcatggggtgggtgagcgcggaggcgtacatgccgcaaatgtcgtaaacgtagaggggctctctgagtattccaagatatgtagggtagcatcttccaccgcggatgctggcgcgcacgtaatcgtatagttcgtgcgagggagcgaggaggtcgggaccgaggttgctacgggcgggctgctctgctcggaagactatctgcctgaagatggcatgtgagttggatgatatggttggacgctggaagacgttgaagctggcgtctgtgagacctaccgcgtcacgcacgaaggaggcgtaggagtcgcgcagcttgttgaccagctcggcggtgacctgcacgtctagggcgcagtagtccagggtttccttgatgatgtcatacttatcctgtcccttttttttccacagctcgcggttgaggacaaactcttcgcggtctttccagtactcttggatcggaaacccgtcggcctccgaacggtaagagcctagcatgtagaactggttgacggcctggtaggcgcagcatcccttttctacgggtagcgcgtatgcctgcgcggccttccggagcgaggtgtgggtgagcgcaaaggtgtccctgaccatgactttgaggtactggtatttgaagtcagtgtcgtcgcatccgccctgctcccagagcaaaaagtccgtgcgctttttggaacgcggatttggcagggcgaaggtgacatcgttgaagagtatctttcccgcgcgaggcataaagttgcgtgtgatgcggaagggtcccggcacctcggaacggttgttaattacctgggcggcgagcacgatctcgtcaaagccgttgatgttgtggcccacaatgtaaagttccaagaagcgcgggatgcccttgatggaaggcaattttttaagttcctcgtaggtgagctcttcaggggagctgagcccgtgctctgaaagggcccagtctgcaagatgagggttggaagcgacgaatgagctccacaggtcacgggccattagcatttgcaggtggtcgcgaaaggtcctaaactggcgacctatggccattttttctggggtgatgcagtagaaggtaagcgggtcttgttcccagcggtcccatccaaggttcgcggctaggtctcgcgcggcagtcactagaggctcatctccgccgaacttcatgaccagcatgaagggcacgagctgcttcccaaaggcccccatccaagtataggtctctacatcgtaggtgacaaagagacgctcggtgcgaggatgcgagccgatcgggaagaactggatctcccgccaccaattggaggagtggctattgatgtggtgaaagtagaagtccctgcgacgggccgaacactcgtgctggcttttgtaaaaacgtgcgcagtactggcagcggtgcacgggctgtacatcctgcacgaggttgacctgacgaccgcgcacaaggaagcagagtgggaatttgagcccctcgcctggcgggtttggctggtggtcttctacttcggctgcttgtccttgaccgtctggctgctcgaggggagttacggtggatcggaccaccacgccgcgcgagcccaaagtccagatgtccgcgcgcggcggtcggagcttgatgacaacatcgcgcagatgggagctgtccatggtctggagctcccgcggcgtcaggtcaggcgggagctcctgcaggtttacctcgcatagacgggtcagggcgcgggctagatccaggtgatacctaatttccaggggctggttggtggcggcgtcgatggcttgcaagaggccgcatccccgcggcgcgactacggtaccgcgcggcgggcggtgggccgcgggggtgtccttggatgatgcatctaaaagcggtgacgcgggcgagcccccggaggtagggggggctccggacccgccgggagagggggcaggggcacgtcggcgccgcgcgcgggcaggagctggtgctgcgcgcgtaggttgctggcgaacgcgacgacgcggcggttgatctcctgaatctggcgcctctgcgtgaagacgacgggcccggtgagcttgaacctgaaagagagttcgacagaatcaatttcggtgtcgttgacggcggcctggcgcaaaatctcctgcacgtctcctgagttgtcttgataggcgatctcggccatgaactgctcgatctcttcctcctggagatctccgcgtccggctcgctccacggtggcggcgaggtcgttggaaatgcgggccatgagctgcgagaaggcgttgaggcctccctcgttccagacgcggctgtagaccacgcccccttcggcatcgcgggcgcgcatgaccacctgcgcgagattgagctccacgtgccgggcgaagacggcgtagtttcgcaggcgctgaaagaggtagttgagggtggtggcggtgtgttctgccacgaagaagtacataacccagcgtcgcaacgtggattcgttgatatcccccaaggcctcaaggcgctccatggcctcgtagaagtccacggcgaagttgaaaaactgggagttgcgcgccgacacggttaactcctcctccagaagacggatgagctcggcgacagtgtcgcgcacctcgcgctcaaaggctacaggggcctcttcttcttcttcaatctcctcttccataagggcctccccttcttcttcttctggcggcggtgggggaggggggacacggcggcgacgacggcgcaccgggaggcggtcgacaaagcgctcgatcatctccccgcggcgacggcgcatggtctcggtgacggcgcggccgttctcgcgggggcgcagttggaagacgccgcccgtcatgtcccggttatgggttggcggggggctgccatgcggcagggatacggcgctaacgatgcatctcaacaattgttgtgtaggtactccgccgccgagggacctgagcgagtccgcatcgaccggatcggaaaacctctcgagaaaggcgtctaaccagtcacagtcgcaaggtaggctgagcaccgtggcgggcggcagcgggcggcggtcggggttgtttctggcggaggtgctgctgatgatgtaattaaagtaggcggtcttgagacggcggatggtcgacagaagcaccatgtccttgggtccggcctgctgaatgcgcaggcggtcggccatgccccaggcttcgttttgacatcggcgcaggtctttgtagtagtcttgcatgagcctttctaccggcacttcttcttctccttcctcttgtcctgcatctcttgcatctatcgctgcggcggcggcggagtttggccgtaggtggcgccctcttcctcccatgcgtgtgaccccgaagcccctcatcggctgaagcagggctaggtcggcgacaacgcgctcggctaatatggcctgctgcacctgcgtgagggtagactggaagtcatccatgtccacaaagcggtggtatgcgcccgtgttgatggtgtaagtgcagttggccataacggaccagttaacggtctggtgacccggctgcgagagctcggtgtacctgagacgcgagtaagccctcgagtcaaatacgtagtcgttgcaagtccgcaccaggtactggtatcccaccaaaaagtgcggcggcggctggcggtagaggggccagcgtagggtggccggggctccgggggcgagatcttccaacataaggcgatgatatccgtagatgtacctggacatccaggtgatgccggcggcggtggtggaggcgcgcggaaagtcgcggacgcggttccagatgttgcgcagcggcaaaaagtgctccatggtcgggacgctctggccggtcaggcgcgcgcaatcgttgacgctctagcgtgcaaaaggagagcctgtaagcgggcactcttccgtggtctggtggataaattcgcaagggtatcatggcggacgaccggggttcgagccccgtatccggccgtccgccgtgatccatgcggttaccgcccgcgtgtcgaacccaggtgtgcgacgtcagacaacgggggagtgctccttttggcttccttccaggcgcggcggctgctgcgctagcttttttggccactggccgcgcgcagcgtaagcggttaggctggaaagcgaaagcattaagtggctcgctccctgtagccggagggttattttccaagggttgagtcgcgggacccccggttcgagtctcggaccggccggactgcggcgaacgggggtttgcctccccgtcatgcaagaccccgcttgcaaattcctccggaaacagggacgagccccttttttgcttttcccagatgcatccggtgctgcggcagatgcgcccccctcctcagcagcggcaagagcaagagcagcggcagacatgcagggcaccctcccctcctcctaccgcgtcaggaggggcgacatccgcggttgacgcggcagcagatggtgattacgaacccccgcggcgccgggcccggcactacctggacttggaggagggcgagggcctggcgcggctaggagcgccctctcctgagcggcacccaagggtgcagctgaagcgtgatacgcgtgaggcgtacgtgccgcggcagaacctgtttcgcgaccgcgagggagaggagcccgaggagatgcgggatcgaaagttccacgcagggcgcgagctgcggcatggcctgaatcgcgagcggttgctgcgcgaggaggactttgagcccgacgcgcgaaccgggattagtcccgcgcgcgcacacgtggcggccgccgacctggtaaccgcatacgagcagacggtgaaccaggagattaactttcaaaaaagctttaacaaccacgtgcgtacgcttgtggcgcgcgaggaggtggctataggactgatgcatctgtgggactttgtaagcgcgctggagcaaaacccaaatagcaagccgctcatggcgcagctgttccttatagtgcagcacagcagggacaacgaggcattcagggatgcgctgctaaacatagtagagcccgagggccgctggctgctcgatttgataaacatcctgcagagcatagtggtgcaggagcgcagcttgagcctggctgacaaggtggccgccatcaactattccatgcttagcctgggcaagttttacgcccgcaagatataccataccccttacgttcccatagacaaggaggtaaagatcgaggggttctacatgcgcatggcgctgaaggtgcttaccttgagcgacgacctgggcgtttatcgcaacgagcgcatccacaaggccgtgagcgtgagccggcggcgcgagctcagcgaccgcgagctgatgcacagcctgcaaagggccctggctggcacgggcagcggcgatagagaggccgagtcctactttgacgcgggcgctgacctgcgctgggccccaagccgacgcgccctggaggcagctggggccggacctgggctggcggtggcacccgcgcgcgctggcaacgtcggcggcgtggaggaatatgacgaggacgatgagtacgagccagaggacggcgagtactaagcggtgatgtttctgatcagatgatgcaagacgcaacggacccggcggtgcgggcggcgctgcagagccagccgtccggccttaactccacggacgactggcgccaggtcatggaccgcatcatgtcgctgactgcgcgcaatcctgacgcgttccggcagcagccgcaggccaaccggctctccgcaattctggaagcggtggtcccggcgcgcgcaaaccccacgcacgagaaggtgctggcgatcgtaaacgcgctggccgaaaacagggccatccggcccgacgaggccggcctggtctacgacgcgctgcttcagcgcgtggctcgttacaacagcggcaacgtgcagaccaacctggaccggctggtgggggatgtgcgcgaggccgtggcgcagcgtgagcgcgcgcagcagcagggcaacctgggctccatggttgcactaaacgccttcctgagtacacagcccgccaacgtgccgcggggacaggaggactacaccaactttgtgagcgcactgcggctaatggtgactgagacaccgcaaagtgaggtgtaccagtctgggccagactattttttccagaccagtagacaaggcctgcagaccgtaaacctgagccaggctttcaaaaacttgcaggggctgtggggggtgcgggctcccacaggcgaccgcgcgaccgtgtctagcttgctgacgcccaactcgcgcctgttgctgctgctaatagcgcccttcacggacagtggcagcgtgtcccgggacacatacctaggtcacttgctgacactgtaccgcgaggccataggtcaggcgcatgtggacgagcatactttccaggagattacaagtgtcagccgcgcgctggggcaggaggacacgggcagcctggaggcaaccctaaactacctgctgaccaaccggcggcagaagatcccctcgttgcacagtttaaacagcgaggaggagcgcattttgcgctacgtgcagcagagcgtgagccttaacctgatgcgcgacggggtaacgcccagcgtggcgctggacatgaccgcgcgcaacatggaaccgggcatgtatgcctcaaaccggccgtttatcaaccgcctaatggactacttgcatcgcgcggccgccgtgaaccccgagtatttcaccaatgccatcttgaacccgcactggctaccgccccctggtttctacaccgggggattcgaggtgcccgagggtaacgatggattcctctgggacgacatagacgacagcgtgttttccccgcaaccgcagaccctgctagagttgcaacagcgcgagcaggcagaggcggcgctgcgaaaggaaagcttccgcaggccaagcagcttgtccgatctaggcgctgcggccccgcggtcagatgctagtagcccatttccaagcttgatagggtctcttaccagcactcgcaccacccgcccgcgcctgctgggcgaggaggagtacctaaacaactcgctgctgcagccgcagcgcgaaaaaaacctgcctccggcatttcccaacaacgggatagagagcctagtggacaagatgagtagatggaagacgtacgcgcaggagcacagggacgtgccaggcccgcgcccgcccacccgtcgtcaaaggcacgaccgtcagcggggtctggtgtgggaggacgatgactcggcagacgacagcagcgtcctggatttgggagggagtggcaacccgtttgcgcaccttcgccccaggctggggagaatgttttaaaaaaaaaaaagcatgatgcaaaataaaaaactcaccaaggccatggcaccgagcgttggttttcttgtattccccttagtatgcggcgcgcggcgatgtatgaggaaggtcctcctccctcctacgagagtgtggtgagcgcggcgccagtggcggcggcgctgggttctcccttcgatgctcccctggacccgccgtttgtgcctccgcggtacctgcggcctaccggggggagaaacagcatccgttactctgagttggcacccctattcgacaccacccgtgtgtacctggtggacaacaagtcaacggatgtggcatccctgaactaccagaacgaccacagcaactttctgaccacggtcattcaaaacaatgactacagcccgggggaggcaagcacacagaccatcaatcttgacgaccggtcgcactggggcggcgacctgaaaaccatcctgcataccaacatgccaaatgtgaacgagttcatgtttaccaataagtttaaggcgcgggtgatggtgtcgcgcttgcctactaaggacaatcaggtggagctgaaatacgagtgggtggagttcacgctgcccgagggcaactactccgagaccatgaccatagaccttatgaacaacgcgatcgtggagcactacttgaaagtgggcagacagaacggggttctggaaagcgacatcggggtaaagtttgacacccgcaacttcagactggggtttgaccccgtcactggtcttgtcatgcctggggtatatacaaacgaagccttccatccagacatcattttgctgccaggatgcggggtggacttcacccacagccgcctgagcaacttgttgggcatccgcaagcggcaacccttccaggagggctttaggatcacctacgatgatctggagggtggtaacattcccgcactgttggatgtggacgcctaccaggcgagcttgaaagatgacaccgaacagggcgggggtggcgcaggcggcagcaacagcagtggcagcggcgcggaagagaactccaacgcggcagccgcggcaatgcagccggtggaggacatgaacgatcatgccattcgcggcgacacctttgccacacgggctgaggagaagcgcgctgaggccgaagcagcggccgaagctgccgcccccgctgcgcaacccgaggtcgagaagcctcagaagaaaccggtgatcaaacccctgacagaggacagcaagaaacgcagttacaacctaataagcaatgacagcaccttcacccagtaccgcagctggtaccttgcatacaactacggcgaccctcagaccggaatccgctcatggaccctgctttgcactcctgacgtaacctgcggctcggagcaggtctactggtcgttgccagacatgatgcaagaccccgtgaccttccgctccacgcgccagatcagcaactttccggtggtgggcgccgagctgttgcccgtgcactccaagagcttctacaacgaccaggccgtctactcccaactcatccgccagtttacctctctgacccacgtgttcaatcgctttcccgagaaccagattttggcgcgcccgccagcccccaccatcaccaccgtcagtgaaaacgttcctgctctcacagatcacgggacgctaccgctgcgcaacagcatcggaggagtccagcgagtgaccattactgacgccagacgccgcacctgcccctacgtttacaaggccctgggcatagtctcgccgcgcgtcctatcgagccgcactttttgagcaagcatgtccatccttatatcgcccagcaataacacaggctggggcctgcgcttcccaagcaagatgtttggcggggccaagaagcgctccgaccaacacccagtgcgcgtgcgcgggcactaccgcgcgccctggggcgcgcacaaacgcggccgcactgggcgcaccaccgtcgatgacgccatcgacgcggtggtggaggaggcgcgcaactacacgcccacgccgccaccagtgtccacagtggacgcggccattcagaccgtggtgcgcggagcccggcgctatgctaaaatgaagagacggcggaggcgcgtagcacgtcgccaccgccgccgacccggcactgccgcccaacgcgcggcggcggccctgcttaaccgcgcacgtcgcaccggccgacgggcggccatgcgggccgctcgaaggctggccgcgggtattgtcactgtgccccccaggtccaggcgacgagcggccgccgcagcagccgcggccattagtgctatgactcagggtcgcaggggcaacgtgtattgggtgcgcgactcggttagcggcctgcgcgtgcccgtgcgcacccgccccccgcgcaactagattgcaagaaaaaactacttagactcgtactgttgtatgtatccagcggcggcggcgcgcaacgaagctatgtccaagcgcaaaatcaaagaagagatgctccaggtcatcgcgccggagatctatggccccccgaagaaggaagagcaggattacaagccccgaaagctaaagcgggtcaaaaagaaaaagaaagatgatgatgatgaacttgacgacgaggtggaactgctgcacgctaccgcgcccaggcgacgggtacagtggaaaggtcgacgcgtaaaacgtgttttgcgacccggcaccaccgtagtctttacgcccggtgagcgctccacccgcacctacaagcgcgtgtatgatgaggtgtacggcgacgaggacctgcttgagcaggccaacgagcgcctcggggagtttgcctacggaaagcggcataaggacatgctggcgttgccgctggacgagggcaacccaacacctagcctaaagcccgtaacactgcagcaggtgctgcccgcgcttgcaccgtccgaagaaaagcgcggcctaaagcgcgagtctggtgacttggcacccaccgtgcagctgatggtacccaagcgccagcgactggaagatgtcttggaaaaaatgaccgtggaacctgggctggagcccgaggtccgcgtgcggccaatcaagcaggtggcgccgggactgggcgtgcagaccgtggacgttcagatacccactaccagtagcaccagtattgccaccgccacagagggcatggagacacaaacgtccccggttgcctcagcggtggcggatgccgcggtgcaggcggtcgctgcggccgcgtccaagacctctacggaggtgcaaacggacccgtggatgtttcgcgtttcagccccccggcgcccgcgccgttcgaggaagtacggcgccgccagcgcgctactgcccgaatatgccctacatccttccattgcgcctacccccggctatcgtggctacacctaccgccccagaagacgagcaactacccgacgccgaaccaccactggaacccgccgccgccgtcgccgtcgccagcccgtgctggccccgatttccgtgcgcagggtggctcgcgaaggaggcaggaccctggtgctgccaacagcgcgctaccaccccagcatcgtttaaaagccggtctttgtggttcttgcagatatggccctcacctgccgcctccgtttcccggtgccgggattccgaggaagaatgcaccgtaggaggggcatggccggccacggcctgacgggcggcatgcgtcgtgcgcaccaccggcggcggcgcgcgtcgcaccgtcgcatgcgcggcggtatcctgcccctccttattccactgatcgccgcggcgattggcgccgtgcccggaattgcatccgtggccttgcaggcgcagagacactgattaaaaacaagttgcatgtggaaaaatcaaaataaaaagtctggactctcacgctcgcttggtcctgtaactattttgtagaatggaagacatcaactttgcgtctctggccccgcgacacggctcgcgcccgttcatgggaaactggcaagatatcggcaccagcaatatgagcggtggcgccttcagctggggctcgctgtggagcggcattaaaaatttcggttccaccgttaagaactatggcagcaaggcctggaacagcagcacaggccagatgctgagggataagttgaaagagcaaaatttccaacaaaaggtggtagatggcctggcctctggcattagcggggtggtggacctggccaaccaggcagtgcaaaataagattaacagtaagcttgatccccgccctcccgtagaggagcctccaccggccgtggagacagtgtctccagaggggcgtggcgaaaagcgtccgcgccccgacagggaagaaactctggtgacgcaaatagacgagcctccctcgtacgaggaggcactaaagcaaggcctgcccaccacccgtcccatcgcgcccatggctaccggagtgctgggccagcacacacccgtaacgctggacctgcctccccccgccgacacccagcagaaacctgtgctgccaggcccgaccgccgttgttgtaacccgtcctagccgcgcgtccctgcgccgcgccgccagcggtccgcgatcgttgcggcccgtagccagtggcaactggcaaagcacactgaacagcatcgtgggtctgggggtgcaatccctgaagcgccgacgatgcttctgatagctaacgtgtcgtatgtgtgtcatgtatgcgtccatgtcgccgccagaggagctgctgagccgccgcgcgcccgctttccaagatggctaccccttcgatgatgccgcagtggtcttacatgcacatctcgggccaggacgcctcggagtacctgagccccgggctggtgcagtttgcccgcgccaccgagacgtacttcagcctgaataacaagtttagaaaccccacggtggcgcctacgcacgacgtgaccacagaccggtcccagcgtttgacgctgcggttcatccctgtggaccgtgaggatactgcgtactcgtacaaggcgcggttcaccctagctgtgggtgataaccgtgtgctggacatggcttccacgtactttgacatccgcggcgtgctggacaggggccctacttttaagccctactctggcactgcctacaacgccctggctcccaagggtgccccaaatccttgcgaatgggatgaagctgctactgctcttgaaataaacctagaagaagaggacgatgacaacgaagacgaagtagacgagcaagctgagcagcaaaaaactcacgtatttgggcaggcgccttattctggtataaatattacaaaggagggtattcaaataggtgtcgaaggtcaaacacctaaatatgccgataaaacatttcaacctgaacctcaaataggagaatctcagtggtacgaaacagaaattaatcatgcagctgggagagtcctaaaaaagactaccccaatgaaaccatgttacggttcatatgcaaaacccacaaatgaaaatggagggcaaggcattcttgtaaagcaacaaaatggaaagctagaaagtcaagtggaaatgcaatttttctcaactactgaggcagccgcaggcaatggtgataacttgactcctaaagtggtattgtacagtgaagatgtagatatagaaaccccagacactcatatttcttacatgcccactattaaggaaggtaactcacgagaactaatgggccaacaatctatgcccaacaggcctaattacattgcttttagggacaattttattggtctaatgtattacaacagcacgggtaatatgggtgttctggcgggccaagcatcgcagttgaatgctgttgtagatttgcaagacagaaacacagagctttcataccagcttttgcttgattccattggtgatagaaccaggtacttttctatgtggaatcaggctgttgacagctatgatccagatgttagaattattgaaaatcatggaactgaagatgaacttccaaattactgctttccactgggaggtgtgattaatacagagactcttaccaaggtaaaacctaaaacaggtcaggaaaatggatgggaaaaagatgctacagaattttcagataaaaatgaaataagagttggaaataattttgccatggaaatcaatctaaatgccaacctgtggagaaatttcctgtactccaacatagcgctgtatttgcccgacaagctaaagtacagtccttccaacgtaaaaatttctgataacccaaacacctacgactacatgaacaagcgagtggtggctcccgggctagtggactgctacattaaccttggagcacgctggtcccttgactatatggacaacgtcaacccatttaaccaccaccgcaatgctggcctgcgctaccgctcaatgttgctgggcaatggtcgctatgtgcccttccacatccaggtgcctcagaagttctttgccattaaaaacctccttctcctgccgggctcatacacctacgagtggaacttcaggaaggatgttaacatggttctgcagagctccctaggaaatgacctaagggttgacggagccagcattaagtttgatagcatttgcctttacgccaccttcttccccatggcccacaacaccgcctccacgcttgaggccatgcttagaaacgacaccaacgaccagtcctttaacgactatctctccgccgccaacatgctctaccctatacccgccaacgctaccaacgtgcccatatccatcccctcccgcaactgggcggctttccgcggctgggccttcacgcgccttaagactaaggaaaccccatcactgggctcgggctacgacccttattacacctactctggctctataccctacctagatggaaccttttacctcaaccacacctttaagaaggtggccattacctttgactcttctgtcagctggcctggcaatgaccgcctgcttacccccaacgagtttgaaattaagcgctcagttgacggggagggttacaacgttgcccagtgtaacatgaccaaagactggttcctggtacaaatgctagctaactataacattggctaccagggcttctatatcccagagagctacaaggaccgcatgtactccttctttagaaacttccagcccatgagccgtcaggtggtggatgatactaaatacaaggactaccaacaggtgggcatcctacaccaacacaacaactctggatttgttggctaccttgcccccaccatgcgcgaaggacaggcctaccctgctaacttcccctatccgcttataggcaagaccgcagttgacagcattacccagaaaaagtttctttgcgatcgcaccctttggcgcatcccattctccagtaactttatgtccatgggcgcactcacagacctgggccaaaaccttctctacgccaactccgcccacgcgctagacatgacttttgaggtggatcccatggacgagcccacccttctttatgttttgtttgaagtctttgacgtggtccgtgtgcaccagccgcaccgcggcgtcatcgaaaccgtgtacctgcgcacgcccttctcggccggcaacgccacaacataaagaagcaagcaacatcaacaacagctgccgccatgggctccagtgagcaggaactgaaagccattgtcaaagatcttggttgtgggccatattttttgggcacctatgacaagcgctttccaggctttgtttctccacacaagctcgcctgcgccatagtcaatacggccggtcgcgagactgggggcgtacactggatggcctttgcctggaacccgcactcaaaaacatgctacctctttgagccctttggcttttctgaccagcgactcaagcaggtttaccagtttgagtacgagtcactcctgcgccgtagcgccattgcttcttcccccgaccgctgtataacgctggaaaagtccacccaaagcgtacaggggcccaactcggccgcctgtggactattctgctgcatgtttctccacgcctttgccaactggccccaaactcccatggatcacaaccccaccatgaaccttattaccggggtacccaactccatgctcaacagtccccaggtacagcccaccctgcgtcgcaaccaggaacagctctacagcttcctggagcgccactcgccctacttccgcagccacagtgcgcagattaggagcgccacttctttttgtcacttgaaaaacatgtaaaaataatgtactagagacactttcaataaaggcaaatgcttttatttgtacactctcgggtgattatttacccccacccttgccgtctgcgccgtttaaaaatcaaaggggttctgccgcgcatcgctatgcgccactggcagggacacgttgcgatactggtgtttagtgctccacttaaactcaggcacaaccatccgcggcagctcggtgaagttttcactccacaggctgcgcaccatcaccaacgcgtttagcaggtcgggcgccgatatcttgaagtcgcagttggggcctccgccctgcgcgcgcgagttgcgatacacagggttgcagcactggaacactatcagcgccgggtggtgcacgctggccagcacgctcttgtcggagatcagatccgcgtccaggtcctccgcgttgctcagggcgaacggagtcaactttggtagctgccttcccaaaaagggcgcgtgcccaggctttgagttgcactcgcaccgtagtggcatcaaaaggtgaccgtgcccggtctgggcgttaggatacagcgcctgcataaaagccttgatctgcttaaaagccacctgagcctttgcgccttcagagaagaacatgccgcaagacttgccggaaaactgattggccggacaggccgcgtcgtgcacgcagcaccttgcgtcggtgttggagatctgcaccacatttcggccccaccggttcttcacgatcttggccttgctagactgctccttcagcgcgcgctgcccgttttcgctcgtcacatccatttcaatcacgtgctccttatttatcataatgcttccgtgtagacacttaagctcgccttcgatctcagcgcagcggtgcagccacaacgcgcagcccgtgggctcgtgatgcttgtaggtcacctctgcaaacgactgcaggtacgcctgcaggaatcgccccatcatcgtcacaaaggtcttgttgctggtgaaggtcagctgcaacccgcggtgctcctcgttcagccaggtcttgcatacggccgccagagcttccacttggtcaggcagtagtttgaagttcgcctttagatcgttatccacgtggtacttgtccatcagcgcgcgcgcagcctccatgcccttctcccacgcagacacgatcggcacactcagcgggttcatcaccgtaatttcactttccgcttcgctgggctcttcctcttcctcttgcgtccgcataccacgcgccactgggtcgtcttcattcagccgccgcactgtgcgcttacctcctttgccatgcttgattagcaccggtgggttgctgaaacccaccatttgtagcgccacatcttctctttcttcctcgctgtccacgattacctctggtgatggcgggcgctcgggcttgggagaagggcgcttctttttcttcttgggcgcaatggccaaatccgccgccgaggtcgatggccgcgggctgggtgtgcgcggcaccagcgcgtcttgtgatgagtcttcctcgtcctcggactcgatacgccgcctcatccgcttttttgggggcgcccggggaggcggcggcgacggggacggggacgacacgtcctccatggttgggggacgtcgcgccgcaccgcgtccgcgctcgggggtggtttcgcgctgctcctcttcccgactggccatttccttctcctataggcagaaaaagatcatggagtcagtcgagaagaaggacagcctaaccgccccctctgagttcgccaccaccgcctccaccgatgccgccaacgcgcctaccaccttccccgtcgaggcacccccgcttgaggaggaggaagtgattatcgagcaggacccaggttttgtaagcgaagacgacgaggaccgctcagtaccaacagaggataaaaagcaagaccaggacaacgcagaggcaaacgaggaacaagtcgggcggggggacgaaaggcatggcgactacctagatgtgggagacgacgtgctgttgaagcatctgcagcgccagtgcgccattatctgcgacgcgttgcaagagcgcagcgatgtgcccctcgccatagcggatgtcagccttgcctacgaacgccacctattctcaccgcgcgtaccccccaaacgccaagaaaacggcacatgcgagcccaacccgcgcctcaacttctaccccgtatttgccgtgccagaggtgcttgccacctatcacatctttttccaaaactgcaagatacccctatcctgccgtgccaaccgcagccgagcggacaagcagctggccttgcggcagggcgctgtcatacctgatatcgcctcgctcaacgaagtgccaaaaatctttgagggtcttggacgcgacgagaagcgcgcggcaaacgctctgcaacaggaaaacagcgaaaatgaaagtcactctggagtgttggtggaactcgagggtgacaacgcgcgcctagccgtactaaaacgcagcatcgaggtcacccactttgcctacccggcacttaacctaccccccaaggtcatgagcacagtcatgagtgagctgatcgtgcgccgtgcgcagcccctggagagggatgcaaatttgcaagaacaaacagaggagggcctacccgcagttggcgacgagcagctagcgcgctggcttcaaacgcgcgagcctgccgacttggaggagcgacgcaaactaatgatggccgcagtgctcgttaccgtggagcttgagtgcatgcagcggttctttgctgacccggagatgcagcgcaagctagaggaaacattgcactacacctttcgacagggctacgtacgccaggcctgcaagatctccaacgtggagctctgcaacctggtctcctaccttggaattttgcacgaaaaccgccttgggcaaaacgtgcttcattccacgctcaagggcgaggcgcgccgcgactacgtccgcgactgcgtttacttatttctatgctacacctggcagacggccatgggcgtttggcagcagtgcttggaggagtgcaacctcaaggagctgcagaaactgctaaagcaaaacttgaaggacctatggacggccttcaacgagcgctccgtggccgcgcacctggcggacatcattttccccgaacgcctgcttaaaaccctgcaacagggtctgccagacttcaccagtcaaagcatgttgcagaactttaggaactttatcctagagcgctcaggaatcttgcccgccacctgctgtgcacttcctagcgactttgtgcccattaagtaccgcgaatgccctccgccgctttggggccactgctaccttctgcagctagccaactaccttgcctaccactctgacataatggaagacgtgagcggtgacggtctactggagtgtcactgtcgctgcaacctatgcaccccgcaccgctccctggtttgcaattcgcagctgcttaacgaaagtcaaattatcggtacctttgagctgcagggtccctcgcctgacgaaaagtccgcggctccggggttgaaactcactccggggctgtggacgtcggcttaccttcgcaaatttgtacctgaggactaccacgcccacgagattaggttctacgaagaccaatcccgcccgcctaatgcggagcttaccgcctgcgtcattacccagggccacattcttggccaattgcaagccatcaacaaagcccgccaagagtttctgctacgaaagggacggggggtttacttggacccccagtccggcgaggagctcaacccaatccccccgccgccgcagccctatcagcagcagccgcgggcccttgcttcccaggatggcacccaaaaagaagctgcagctgccgccgccacccacggacgaggaggaatactgggacagtcaggcagaggaggttttggacgaggaggaggaggacatgatggaagactgggagagcctagacgaggaagcttccgaggtcgaagaggtgtcagacgaaacaccgtcaccctcggtcgcattcccctcgccggcgccccagaaatcggcaaccggttccagcatggctacaacctccgctcctcaggcgccgccggcactgcccgttcgccgacccaaccgtagatgggacaccactggaaccagggccggtaagtccaagcagccgccgccgttagcccaagagcaacaacagcgccaaggctaccgctcatggcgcgggcacaagaacgccatagttgcttgcttgcaagactgtgggggcaacatctccttcgcccgccgctttcttctctaccatcacggcgtggccttcccccgtaacatcctgcattactaccgtcatctctacagcccatactgcaccggcggcagcggcagcaacagcagcggccacacagaagcaaaggcgaccggatagcaagactctgacaaagcccaagaaatccacagcggcggcagcagcaggaggaggagcgctgcgtctggcgcccaacgaacccgtatcgacccgcgagcttagaaacaggatttttcccactctgtatgctatatttcaacagagcaggggccaagaacaagagctgaaaataaaaaacaggtctctgcgatccctcacccgcagctgcctgtatcacaaaagcgaagatcagcttcggcgcacgctggaagacgcggaggctctcttcagtaaatactgcgcgctgactcttaaggactagtttcgcgccctttctcaaatttaagcgcgaaaactacgtcatctccagcggccacacccggcgccagcacctgttgtcagcgccattatgagcaaggaaattcccacgccctacatgtggagttaccagccacaaatgggacttgcggctggagctgcccaagactactcaacccgaataaactacatgagcgcgggaccccacatgatatcccgggtcaacggaatacgcgcccaccgaaaccgaattctcctggaacaggcggctattaccaccacacctcgtaataaccttaatccccgtagttggcccgctgccctggtgtaccaggaaagtcccgctcccaccactgtggtacttcccagagacgcccaggccgaagttcagatgactaactcaggggcgcagcttgcgggcggctttcgtcacagggtgcggtcgcccgggcagggtataactcacctgacaatcagagggcgaggtattcagctcaacgacgagtcggtgagctcctcgcttggtctccgtccggacgggacatttcagatcggcggcgccggccgctcttcattcacgcctcgtcaggcaatcctaactctgcagacctcgtcctctgagccgcgctctggaggcattggaactctgcaatttattgaggagtttgtgccatcggtctactttaaccccttctcgggacctcccggccactatccggatcaatttattcctaactttgacgcggtaaaggactcggcggacggctacgactgaatgttaagtggagaggcagagcaactgcgcctgaaacacctggtccactgtcgccgccacaagtgctttgcccgcgactccggtgagttttgctactttgaattgcccgaggatcatatcgagggcccggcgcacggcgtccggcttaccgcccagggagagcttgcccgtagcctgattcgggagtttacccagcgccccctgctagttgagcgggacaggggaccctgtgttctcactgtgatttgcaactgtcctaaccctggattacatcaagatcctctagttaatgtcaggtcgcctaagtcgattaactagagtacccggggatcttattccctttaactaataaaaaaaaataataaagcatcacttacttaaaatcagttagcaaatttctgtccagtttattcagcagcacctccttgccctcctcccagctctggtattgcagcttcctcctggctgcaaactttctccacaatctaaatggaatgtcagtttcctcctgttcctgtccatccgcacccactatcttcatgttgttgcagatgaagcgcgcaagaccgtctgaagataccttcaaccccgtgtatccatatgacacggaaaccggtcctccaactgtgccttttcttactcctccctttgtatcccccaatgggtttcaagagagtccccctggggtactctctttgcgcctatccgaacctctagttacctccaatggcatgcttgcgctcaaaatgggcaacggcctctctctggacgaggccggcaaccttacctcccaaaatgtaaccactgtgagcccacctctcaaaaaaaccaagtcaaacataaacctggaaatatctgcacccctcacagttacctcagaagccctaactgtggctgccgccgcacctctaatggtcgcgggcaacacactcaccatgcaatcacaggccccgctaaccgtgcacgactccaaacttagcattgccacccaaggacccctcacagtgtcagaaggaaagctagccctgcaaacatcaggccccctcaccaccaccgatagcagtacccttactatcactgcctcaccccctctaactactgccactggtagcttgggcattgacttgaaagagcccatttatacacaaaatggaaaactaggactaaagtacggggctcctttgcatgtaacagacgacctaaacactttgaccgtagcaactggtccaggtgtgactattaataatacttccttgcaaactaaagttactggagccttgggttttgattcacaaggcaatatgcaacttaatgtagcaggaggactaaggattgattctcaaaacagacgccttatacttgatgttagttatccgtttgatgctcaaaaccaactaaatctaagactaggacagggccctctttttataaactcagcccacaacttggatattaactacaacaaaggcctttacttgtttacagcttcaaacaattccaaaaagcttgaggttaacctaagcactgccaaggggttgatgtttgacgctacagccatagccattaatgcaggagatgggcttgaatttggttcacctaatgcaccaaacacaaatcccctcaaaacaaaaattggccatggcctagaatttgattcaaacaaggctatggttcctaaactaggaactggccttagttttgacagcacaggtgccattacagtaggaaacaaaaataatgataagctaactttgtggaccggaataaaccctccacctaactgtcaaattgtggaaaacactaatacaaatgatggcaaacttactttagtattagtaaaaaatggagggcttgttaatggctacgtgtctctagttggtgtatcagacactgtgaaccaaatgttcacacaaaagacagcaaacatccaattaagattatattttgactcttctggaaatctattaactgaggaatcagacttaaaaattccacttaaaaataaatcttctacagcgaccagtgaaactgtagccagcagcaaagcctttatgccaagtactacagcttatcccttcaacaccactactagggatagtgaaaactacattcatggaatatgttactacatgactagttatgatagaagtctatttcccttgaacatttctataatgctaaacagccgtatgatttcttccaatgttgcctatgccatacaatttgaatggaatctaaatgcaagtgaatctccagaaagcaacatagctacgctgaccacatccccctttttcttttcttacattacagaagacgacaactaaagaatcgtttgtgttatgtttcaacgtgtttatttttcaattgcagaaaatttcaagtcatttttcattcagtagtatagccccaccaccacatagcttatacagatcaccgtaccttaatcaaactcacagaaccctagtattcaacctgccacctccctcccaacacacagagtacacagtcctttctccccggctggccttaaaaagcatcatatcatgggtaacagacatattcttaggtgttatattccacacggtttcctgtcgagccaaacgctcatcagtgatattaataaactccccgggcagctcacttaagttcatgtcgctgtccagctgctgagccacaggctgctgtccaacttgcggttgcttaacgggcggcgaaggagaagtccacgcctacatgggggtagagtcataatcgtgcatcaggatagggcggtggtgctgcagcagcgcgcgaataaactgctgccgccgccgctccgtcctgcaggaatacaacatggcagtggtctcctcagcgatgattcgcaccgcccgcagcataaggcgccttgtcctccgggcacagcagcgcaccctgatctcacttaaatcagcacagtaactgcagcacagcaccacaatattgttcaaaatcccacagtgcaaggcgctgtatccaaagctcatggcggggaccacagaacccacgtggccatcataccacaagcgcaggtagattaagtggcgacccctcataaacacgctggacataaacattacctcttttggcatgttgtaattcaccacctcccctctgattaaacatggcgccatccaccaccatcctaaaccagctggccaaaacctgcccgccggctatacactgcagggaaccgggactggaacaatgacagtggagagcccaggactcgtaaccatggatcatcatgctcgtcatgatatcaatgttggcacaacacaggcacacgtgcatacacttcctcaggattacaagctcctcccgcgttagaaccatatcccagggaacaacccattcctgaatcagcgtaaatcccacactgcagggaagacctcgcacgtaactcacgttgtgcattgtcaaagtgttacattcgggcagcagcggatgatcctccagtatggtagcgcgggtttctgtctcaaaaggaggtagacgatccctactgtacggagtgcgccgagacaaccgagatcgtgttggtcgtagtgtcatgccaaatggaacgccggacgtagtcatatttcctgaagcaaaaccaggtgcgggcgtgacaaacagatctgcgtctccggtctcgccgcttagatcgctctgtgtagtagttgtagtatatccactctctcaaagcatccaggcgccccctggcttcgggttctatgtaaactccttcatgcgccgctgccctgataacatccaccaccgcagaataagccacacccagccaacctacacattcgttctgcgagtcacacacgggaggagcgggaagagctggaagaaccatgtttttttttttattccaaaagattatccaaaacctcaaaatgaagatctattaagtgaacgcgctcccctccggtggcgtggtcaaactctacagccaaagaacagataatggcatttgtaagatgttgcacaatggcttccaaaaggcaaacggccctcacgtccaagtggacgtaaaggctaaacccttcagggtgaatctcctctataaacattccagcaccttcaaccatgcccaaataattctcatctcgccaccttctcaatatatctctaagcaaatcccgaatattaagtccggccattgtaaaaatctgctccagagcgccctccaccttcagcctcaagcagcgaatcatgattgcaaaaattcaggttcctcacagacctgtataagattcaaaagcggaacattaacaaaaataccgcgatcccgtaggtcccttcgcagggccagctgaacataatcgtgcaggtctgcacggaccagcgcggccacttccccgccaggaaccatgacaaaagaacccacactgattatgacacgcatactcggagctatgctaaccagcgtagccccgatgtaagcttgttgcatgggcggcgatataaaatgcaaggtgctgctcaaaaaatcaggcaaagcctcgcgcaaaaaagaaagcacatcgtagtcatgctcatgcagataaaggcaggtaagctccggaaccaccacagaaaaagacaccatttttctctcaaacatgtctgcgggtttctgcataaacacaaaataaaataacaaaaaaacatttaaacattagaagcctgtcttacaacaggaaaaacaacccttataagcataagacggactacggccatgccggcgtgaccgtaaaaaaactggtcaccgtgattaaaaagcaccaccgacagctcctcggtcatgtccggagtcataatgtaagactcggtaaacacatcaggttgattcacatcggtcagtgctaaaaagcgaccgaaatagcccgggggaatacatacccgcaggcgtagagacaacattacagcccccataggaggtataacaaaattaataggagagaaaaacacataaacacctgaaaaaccctcctgcctaggcaaaatagcaccctcccgctccagaacaacatacagcgcttccacagcggcagccataacagtcagccttaccagtaaaaaagaaaacctattaaaaaaacaccactcgacacggcaccagctcaatcagtcacagtgtaaaaaagggccaagtgcagagcgagtatatataggactaaaaaatgacgtaacggttaaagtccacaaaaaacacccagaaaaccgcacgcgaacctacgcccagaaacgaaagccaaaaaacccacaacttcctcaaatcgtcacttccgttttcccacgttacgtcacttcccattttaagaaaactacaattcccaacacatacaagttactccgccctaaaacctacgtcacccgccccgttcccacgccccgcgccacgtcacaaactccaccccctcattatcatattggcttcaatccaaaataaggtatattattgatgatg

SEQ ID NO: 22 - DNA, 36901 bp, Artificial Sequence
  pAdk35F2-Spike/E4orf6(-1kb)-E4dlO4-7(E4re#17)
ttaattaacatcatcaataatataccttattttggattgaagccaatatgataatgagggggtggagtttgtgacgtggcgcggggcgtgggaacggggcgggtgacgtagtagtgtggcggaagtgtgatgttgcaagtgtggcggaacacatgtaagcgacggatgtggcaaaagtgacgtttttggtgtgcgccggtgtacacaggaagtgacaattttcgcgcggttttaggcggatgttgtagtaaatttgggcgtaaccgagtaagatttggccattttcgcgggaaaactgaataagaggaagtgaaatctgaataattttgtgttactcatagcgcgtaataatttctgtaatagtaatcaattacggggtcattagttcatagcccatatatggagttccgcgttacataacttacggtaaatggcccgcctggctgaccgcccaacgacccccgcccattgacgtcaataatgacgtatgttcccatagtaacgccaatagggactttccattgacgtcaatgggtggagtatttacggtaaactgcccacttggcagtacatcaagtgtatcatatgccaagtacgccccctattgacgtcaatgacggtaaatggcccgcctggcattatgcccagtacatgaccttatgggactttcctacttggcagtacatctacgtattagtcatcgctattaccatggtgatgcggttttggcagtacatcaatgggcgtggatagcggtttgactcacggggatttccaagtctccaccccattgacgtcaatgggagtttgttttggcaccaaaatcaacgggactttccaaaatgtcgtaacaactccgccccattgacgcaaatgggcggtaggcgtgtacggtgggaggtctatataagcagagctctccctatcagtgatagagatctccctatcagtgatagagatcgtcgacgagctcgtttagtgaaccgtcagatcgcctggagacgccatccacgctgttttgacctccatagaagacaccgggaccgatccagcctccgatttgccaccatgtttgtgttcctggtgctgctgccactggtgtccagccagtgtgtgaacctgaccaccaggacccaacttcctcctgcctacaccaactccttcaccaggggagtctactaccctgacaaggtgttcaggtcctctgtgctgcacagcacccaggacctgttcctgccattcttcagcaatgtgacctggttccatgccatccatgtgtctggcaccaatggcaccaagaggtttgacaaccctgtgctgccattcaatgatggagtctactttgccagcacagagaagagcaacatcatcaggggctggatttttggcaccaccctggacagcaagacccagtccctgctgattgtgaacaatgccaccaatgtggtgattaaggtgtgtgagttccagttctgtaatgacccattcctgggagtctactaccacaagaacaacaagtcctggatggagtctgagttcagggtctactcctctgccaacaactgtacctttgaatatgtgagccaaccattcctgatggacttggagggcaagcagggcaacttcaagaacctgagggagtttgtgttcaagaacattgatggctacttcaagatttacagcaaacacacaccaatcaacctggtgagggacctgccacagggcttctctgccttggaaccactggtggacctgccaattggcatcaacatcaccaggttccagaccctgctggctctgcacaggtcctacctgacacctggagactcctcctctggctggacagcaggagcagcagcctactatgtgggctacctccaaccaaggaccttcctgctgaaatacaatgagaatggcaccatcacagatgctgtggactgtgccctggacccactgtctgagaccaagtgtaccctgaaatccttcacagtggagaagggcatctaccagaccagcaacttcagggtccaaccaacagagagcattgtgaggtttccaaacatcaccaacctgtgtccatttggagaggtgttcaatgccaccaggtttgcctctgtctatgcctggaacaggaagaggattagcaactgtgtggctgactactctgtgctctacaactctgcctccttcagcaccttcaagtgttatggagtgagcccaaccaaactgaatgacctgtgtttcaccaatgtctatgctgactcctttgtgattaggggagatgaggtgagacagattgcccctggacaaacaggcaagattgctgactacaactacaaactgcctgatgacttcacaggctgtgtgattgcctggaacagcaacaacctggacagcaaggtgggaggcaactacaactacctctacagactgttcaggaagagcaacctgaaaccatttgagagggacatcagcacagagatttaccaggctggcagcacaccatgtaatggagtggagggcttcaactgttactttccactccaatcctatggcttccaaccaaccaatggagtgggctaccaaccatacagggtggtggtgctgtcctttgaactgctccatgcccctgccacagtgtgtggaccaaagaagagcaccaacctggtgaagaacaagtgtgtgaacttcaacttcaatggactgacaggcacaggagtgctgacagagagcaacaagaagttcctgccattccaacagtttggcagggacattgctgacaccacagatgctgtgagggacccacagaccttggagattctggacatcacaccatgttcctttggaggagtgtctgtgattacacctggcaccaacaccagcaaccaggtggctgtgctctaccaggatgtgaactgtactgaggtgcctgtggctatccatgctgaccaacttacaccaacctggagggtctacagcacaggcagcaatgtgttccagaccagggctggctgtctgattggagcagagcatgtgaacaactcctatgagtgtgacatcccaattggagcaggcatctgtgcctcctaccagacccagaccggtggcggtgggtcgaggtctgtggcaagccagagcatcattgcctacacaatgagtctgggagcagagaactctgtggcttacagcaacaacagcattgccatcccaaccaacttcaccatctctgtgaccacagagattctgcctgtgagtatgaccaagacctctgtggactgtacaatgtatatctgtggagacagcacagagtgtagcaacctgctgctccaatatggctccttctgtacccaacttaacagggctctgacaggcattgctgtggaacaggacaagaacacccaggaggtgtttgcccaggtgaagcagatttacaagacacctccaatcaaggactttggaggcttcaacttcagccagattctgcctgacccaagcaagccaagcaagaggtccttcattgaggacctgctgttcaacaaggtgaccctggctgatgctggcttcatcaagcaatatggagactgtctgggagacattgctgccagggacctgatttgtgcccagaagttcaatggactgacagtgctgcctccactgctgacagatgagatgattgcccaatacacctctgccctgctggctggcaccatcacctctggctggacctttggagcaggagcagccctccaaatcccatttgctatgcagatggcttacaggttcaatggcattggagtgacccagaatgtgctctatgagaaccagaaactgattgccaaccagttcaactctgccattggcaagattcaggactccctgtccagcacagcctctgccctgggcaaactccaagatgtggtgaaccagaatgcccaggctctgaacaccctggtgaagcaactttccagcaactttggagccatctcctctgtgctgaatgacatcctgagcagactggacaaggtggaggctgaggtccagattgacagactgattacaggcagactccaatccctccaaacctatgtgacccaacaacttatcagggctgctgagattagggcatctgccaacctggctgccaccaagatgagtgagtgtgtgctgggacaaagcaagagggtggacttctgtggcaagggctaccacctgatgagttttccacagtctgcccctcatggagtggtgttcctgcatgtgacctatgtgcctgcccaggagaagaacttcaccacagcccctgccatctgccatgatggcaaggctcactttccaagggagggagtgtttgtgagcaatggcacccactggtttgtgacccagaggaacttctatgaaccacagattatcaccacagacaacacctttgtgtctggcaactgtgatgtggtgattggcattgtgaacaacacagtctatgacccactccaacctgaactggactccttcaaggaggaactggacaaatacttcaagaaccacaccagccctgatgtggacctgggagacatctctggcatcaatgcctctgtggtgaacatccagaaggagattgacagactgaatgaggtggctaagaacctgaatgagtccctgattgacctccaagaactgggcaaatatgaacaatacatcaagtggccatgaaaattgatcataatcagccataccacatttgtagaggttttacttgctttaaaaaacctcccacacctccccctgaacctgaaacataaaatgaatgcaattgttgttgttaacttgtttattgcagcttataatggttacaaataaagcaatagcatcacaaatttcacaaataaagcatttttttcactgcattctagttgtggtttgtccaaactcatcaatgtatcttaacgcggatcatggtgtctttttctgtggtggttccggagcttacctgcctttatctgcatgagcatgactacgatgtgctttcttttttgcgcgaggctttgcctgattttttgagcagcaccttgcattttatatcgccgcccatgcaacaagcttacatcggggctacgctggttagcatagctccgagtatgcgtgtcataatcagtgtgggttcttttgtcatggttcctggcggggaagtggccgcgctggtccgtgcagacctgcacgattatgttcagctggccctgcgaagggacctacgggatcgcggtatttttgttaatgttccgcttttgaatcttatacaggtctgtgaggaacctgaatttttgcaatcatgattcgctgcttgaggctgaaggtggagggcgctctggagcagatttttacaatggccggacttaatattcgggatttgcttagagatatattgagaaggtggcgagatgagaattatttgggcatggttgaaggtgctggaatgtttatagaggagattcaccctgaagggtttagcctttacgtccacttggacgtgagggccgtttgccttttggaagccattgtgcaacatcttacaaatgccattatctgttctttggctgtagagtttgaccacgccaccggaggggagcgcgttcacttaatagatcttcattttgaggttttggataatcttttggaataaaaaaaaaaacatggttcttccagctcttcccgctcctcccgtgtgtgactcgcagaacgaatgtgtaggttggctgggtgtggcttattctgcggtggtggatgttatcagggcagcggcgcatgaaggagtttacatagaacccgaagccagggggcgcctggatgctttgagagagtggatatactacaactactacacagagcgatctaagcggcgagaccggagacgcagatctgtttgtcacgcccgcacctggttttgcttcaggaaatatgactacgtccggcgttccatttggcatgacactacgaccaacacgatctcggttgtctcggcgcactccgtacagtagggatcgtctacctccttttgagacagaaacccgcgctaccatactggaggatcatccgctgctgcccgaatgtaacactttgacaatgcacaacgtgagttacgtgcgaggtcttccctgcagtgtgggatttacgctgattcaggaatgggttgttccctgggatatggttctaacgcgggaggagcttgtaatcctgaggaagtgtatgcacgtgtgcctgtgttgtgccaacattgatatcatgacgagcatgatgatccatggttacgagtcctgggctctccactgtcattgttccagtcccggttccctgcagtgtatagccggcgggcaggttttggccagctggtttaggatggtggtggatggcgccatgtttaatcagaggtttatatggtaccgggaggtggtgaattacaacatgccaaaagaggtaatgtttatgtccagcgtgtttatgaggggtcgccacttaatctacctgcgcttgtggtatgatggccacgtgggttctgtggtccccgccatgagctttggatacagcgccttgcactgtgggattttgaacaatattgtggtgctgtgctgcagttactgtgctgatttaagtgagatcagggtgcgctgctgtgcccggaggacaaggcgccttatgctgcgggcggtgcgaatcatcgctgaggagaccactgccatgttgtattcctgcaggacggagcggcggcggcagcagtttattcgcgcgctgctgcagcaccaccgccctatcctgatgcacgattatgactctacccccatgtagaagcttggggatcaattctctagagctcgctgatcagcctcgactgtgccttctagttgccagccatctgttgtttgcccctcccccgtgccttccttgaccctggaaggtgccactcccactgtcctttcctaataaaatgaggaaattgcatcgcattgtctgagtaggtgtcattctattctggggggtggggtggggcaggacagcaagggggaggattgggaagacaatagcaggcatgctggggatgcggtgggctctatggcttctgaggaaattgggcgtggcttaagggtgggaaagaatatataaggtgggggtcttatgtagttttgtatctgttttgcagcagccgccgccgccatgagcaccaactcgtttgatggaagcattgtgagctcatatttgacaacgcgcatgcccccatgggccggggtgcgtcagaatgtgatgggctccagcattgatggtcgccccgtcctgcccgcaaactctactaccttgacctacgagaccgtgtctggaacgccgttggagactgcagcctccgccgccgcttcagccgctgcagccaccgcccgcgggattgtgactgactttgctttcctgagcccgcttgcaagcagtgcagcttcccgttcatccgcccgcgatgacaagttgacggctcttttggcacaattggattctttgacccgggaacttaatgtcgtttctcagcagctgttggatctgcgccagcaggtttctgccctgaaggcttcctcccctcccaatgcggtttaaaacataaataaaaaaccagactctgtttggatttggatcaagcaagtgtcttgctgtctttatttaggggttttgcgcgcgcggtaggcccgggaccagcggtctcggtcgttgagggtcctgtgtattttttccaggacgtggtaaaggtgactctggatgttcagatacatgggcataagcccgtctctggggtggaggtagcaccactgcagagcttcatgctgcggggtggtgttgtagatgatccagtcgtagcaggagcgctgggcgtggtgcctaaaaatgtctttcagtagcaagctgattgccaggggcaggcccttggtgtaagtgtttacaaagcggttaagctgggatgggtgcatacgtggggatatgagatgcatcttggactgtatttttaggttggctatgttcccagccatatccctccggggattcatgttgtgcagaaccaccagcacagtgtatccggtgcacttgggaaatttgtcatgtagcttagaaggaaatgcgtggaagaacttggagacgcccttgtgacctccaagattttccatgcattcgtccataatgatggcaatgggcccacgggcggcggcctgggcgaagatatttctgggatcactaacgtcatagttgtgttccaggatgagatcgtcataggccatttttacaaagcgcgggcggagggtgccagactgcggtataatggttccatccggcccaggggcgtagttaccctcacagatttgcatttcccacgctttgagttcagatggggggatcatgtctacctgcggggcgatgaagaaaacggtttccggggtaggggagatcagctgggaagaaagcaggttcctgagcagctgcgacttaccgcagccggtgggcccgtaaatcacacctattaccgggtgcaactggtagttaagagagctgcagctgccgtcatccctgagcaggggggccacttcgttaagcatgtccctgactcgcatgttttccctgaccaaatccgccagaaggcgctcgccgcccagcgatagcagttcttgcaaggaagcaaagtttttcaacggtttgagaccgtccgccgtaggcatgcttttgagcgtttgaccaagcagttccaggcggtcccacagctcggtcacctgctctacggcatctcgatccagcatatctcctcgtttcgcgggttggggcggctttcgctgtacggcagtagtcggtgctcgtccagacgggccagggtcatgtctttccacgggcgcagggtcctcgtcagcgtagtctgggtcacggtgaaggggtgcgctccgggctgcgcgctggccagggtgcgcttgaggctggtcctgctggtgctgaagcgctgccggtcttcgccctgcgcgtcggccaggtagcatttgaccatggtgtcatagtccagcccctccgcggcgtggcccttggcgcgcagcttgcccttggaggaggcgccgcacgaggggcagtgcagacttttgagggcgtagagcttgggcgcgagaaataccgattccggggagtaggcatccgcgccgcaggccccgcagacggtctcgcattccacgagccaggtgagctctggccgttcggggtcaaaaaccaggtttcccccatgctttttgatgcgtttcttacctctggtttccatgagccggtgtccacgctcggtgacgaaaaggctgtccgtgtccccgtatacagacttgagaggcctgtcctcgagcggtgttccgcggtcctcctcgtatagaaactcggaccactctgagacaaaggctcgcgtccaggccagcacgaaggaggctaagtgggaggggtagcggtcgttgtccactagggggtccactcgctccagggtgtgaagacacatgtcgccctcttcggcatcaaggaaggtgattggtttgtaggtgtaggccacgtgaccgggtgttcctgaaggggggctataaaagggggtgggggcgcgttcgtcctcactctcttccgcatcgctgtctgcgagggccagctgttggggtgagtactccctctgaaaagcgggcatgacttctgcgctaagattgtcagtttccaaaaacgaggaggatttgatattcacctggcccgcggtgatgcctttgagggtggccgcatccatctggtcagaaaagacaatctttttgttgtcaagcttggtggcaaacgacccgtagagggcgttggacagcaacttggcgatggagcgcagggtttggtttttgtcgcgatcggcgcgctccttggccgcgatgtttagctgcacgtattcgcgcgcaacgcaccgccattcgggaaagacggtggtgcgctcgtcgggcaccaggtgcacgcgccaaccgcggttgtgcagggtgacaaggtcaacgctggtggctacctctccgcgtaggcgctcgttggtccagcagaggcggccgcccttgcgcgagcagaatggcggtagggggtctagctgcgtctcgtccggggggtctgcgtccacggtaaagaccccgggcagcaggcgcgcgtcgaagtagtctatcttgcatccttgcaagtctagcgcctgctgccatgcgcgggcggcaagcgcgcgctcgtatgggttgagtgggggaccccatggcatggggtgggtgagcgcggaggcgtacatgccgcaaatgtcgtaaacgtagaggggctctctgagtattccaagatatgtagggtagcatcttccaccgcggatgctggcgcgcacgtaatcgtatagttcgtgcgagggagcgaggaggtcgggaccgaggttgctacgggcgggctgctctgctcggaagactatctgcctgaagatggcatgtgagttggatgatatggttggacgctggaagacgttgaagctggcgtctgtgagacctaccgcgtcacgcacgaaggaggcgtaggagtcgcgcagcttgttgaccagctcggcggtgacctgcacgtctagggcgcagtagtccagggtttccttgatgatgtcatacttatcctgtcccttttttttccacagctcgcggttgaggacaaactcttcgcggtctttccagtactcttggatcggaaacccgtcggcctccgaacggtaagagcctagcatgtagaactggttgacggcctggtaggcgcagcatcccttttctacgggtagcgcgtatgcctgcgcggccttccggagcgaggtgtgggtgagcgcaaaggtgtccctgaccatgactttgaggtactggtatttgaagtcagtgtcgtcgcatccgccctgctcccagagcaaaaagtccgtgcgctttttggaacgcggatttggcagggcgaaggtgacatcgttgaagagtatctttcccgcgcgaggcataaagttgcgtgtgatgcggaagggtcccggcacctcggaacggttgttaattacctgggcggcgagcacgatctcgtcaaagccgttgatgttgtggcccacaatgtaaagttccaagaagcgcgggatgcccttgatggaaggcaattttttaagttcctcgtaggtgagctcttcaggggagctgagcccgtgctctgaaagggcccagtctgcaagatgagggttggaagcgacgaatgagctccacaggtcacgggccattagcatttgcaggtggtcgcgaaaggtcctaaactggcgacctatggccattttttctggggtgatgcagtagaaggtaagcgggtcttgttcccagcggtcccatccaaggttcgcggctaggtctcgcgcggcagtcactagaggctcatctccgccgaacttcatgaccagcatgaagggcacgagctgcttcccaaaggcccccatccaagtataggtctctacatcgtaggtgacaaagagacgctcggtgcgaggatgcgagccgatcgggaagaactggatctcccgccaccaattggaggagtggctattgatgtggtgaaagtagaagtccctgcgacgggccgaacactcgtgctggcttttgtaaaaacgtgcgcagtactggcagcggtgcacgggctgtacatcctgcacgaggttgacctgacgaccgcgcacaaggaagcagagtgggaatttgagcccctcgcctggcgggtttggctggtggtcttctacttcggctgcttgtccttgaccgtctggctgctcgaggggagttacggtggatcggaccaccacgccgcgcgagcccaaagtccagatgtccgcgcgcggcggtcggagcttgatgacaacatcgcgcagatgggagctgtccatggtctggagctcccgcggcgtcaggtcaggcgggagctcctgcaggtttacctcgcatagacgggtcagggcgcgggctagatccaggtgatacctaatttccaggggctggttggtggcggcgtcgatggcttgcaagaggccgcatccccgcggcgcgactacggtaccgcgcggcgggcggtgggccgcgggggtgtccttggatgatgcatctaaaagcggtgacgcgggcgagcccccggaggtagggggggctccggacccgccgggagagggggcaggggcacgtcggcgccgcgcgcgggcaggagctggtgctgcgcgcgtaggttgctggcgaacgcgacgacgcggcggttgatctcctgaatctggcgcctctgcgtgaagacgacgggcccggtgagcttgaacctgaaagagagttcgacagaatcaatttcggtgtcgttgacggcggcctggcgcaaaatctcctgcacgtctcctgagttgtcttgataggcgatctcggccatgaactgctcgatctcttcctcctggagatctccgcgtccggctcgctccacggtggcggcgaggtcgttggaaatgcgggccatgagctgcgagaaggcgttgaggcctccctcgttccagacgcggctgtagaccacgcccccttcggcatcgcgggcgcgcatgaccacctgcgcgagattgagctccacgtgccgggcgaagacggcgtagtttcgcaggcgctgaaagaggtagttgagggtggtggcggtgtgttctgccacgaagaagtacataacccagcgtcgcaacgtggattcgttgatatcccccaaggcctcaaggcgctccatggcctcgtagaagtccacggcgaagttgaaaaactgggagttgcgcgccgacacggttaactcctcctccagaagacggatgagctcggcgacagtgtcgcgcacctcgcgctcaaaggctacaggggcctcttcttcttcttcaatctcctcttccataagggcctccccttcttcttcttctggcggcggtgggggaggggggacacggcggcgacgacggcgcaccgggaggcggtcgacaaagcgctcgatcatctccccgcggcgacggcgcatggtctcggtgacggcgcggccgttctcgcgggggcgcagttggaagacgccgcccgtcatgtcccggttatgggttggcggggggctgccatgcggcagggatacggcgctaacgatgcatctcaacaattgttgtgtaggtactccgccgccgagggacctgagcgagtccgcatcgaccggatcggaaaacctctcgagaaaggcgtctaaccagtcacagtcgcaaggtaggctgagcaccgtggcgggcggcagcgggcggcggtcggggttgtttctggcggaggtgctgctgatgatgtaattaaagtaggcggtcttgagacggcggatggtcgacagaagcaccatgtccttgggtccggcctgctgaatgcgcaggcggtcggccatgccccaggcttcgttttgacatcggcgcaggtctttgtagtagtcttgcatgagcctttctaccggcacttcttcttctccttcctcttgtcctgcatctcttgcatctatcgctgcggcggcggcggagtttggccgtaggtggcgccctcttcctcccatgcgtgtgaccccgaagcccctcatcggctgaagcagggctaggtcggcgacaacgcgctcggctaatatggcctgctgcacctgcgtgagggtagactggaagtcatccatgtccacaaagcggtggtatgcgcccgtgttgatggtgtaagtgcagttggccataacggaccagttaacggtctggtgacccggctgcgagagctcggtgtacctgagacgcgagtaagccctcgagtcaaatacgtagtcgttgcaagtccgcaccaggtactggtatcccaccaaaaagtgcggcggcggctggcggtagaggggccagcgtagggtggccggggctccgggggcgagatcttccaacataaggcgatgatatccgtagatgtacctggacatccaggtgatgccggcggcggtggtggaggcgcgcggaaagtcgcggacgcggttccagatgttgcgcagcggcaaaaagtgctccatggtcgggacgctctggccggtcaggcgcgcgcaatcgttgacgctctagcgtgcaaaaggagagcctgtaagcgggcactcttccgtggtctggtggataaattcgcaagggtatcatggcggacgaccggggttcgagccccgtatccggccgtccgccgtgatccatgcggttaccgcccgcgtgtcgaacccaggtgtgcgacgtcagacaacgggggagtgctccttttggcttccttccaggcgcggcggctgctgcgctagcttttttggccactggccgcgcgcagcgtaagcggttaggctggaaagcgaaagcattaagtggctcgctccctgtagccggagggttattttccaagggttgagtcgcgggacccccggttcgagtctcggaccggccggactgcggcgaacgggggtttgcctccccgtcatgcaagaccccgcttgcaaattcctccggaaacagggacgagccccttttttgcttttcccagatgcatccggtgctgcggcagatgcgcccccctcctcagcagcggcaagagcaagagcagcggcagacatgcagggcaccctcccctcctcctaccgcgtcaggaggggcgacatccgcggttgacgcggcagcagatggtgattacgaacccccgcggcgccgggcccggcactacctggacttggaggagggcgagggcctggcgcggctaggagcgccctctcctgagcggcacccaagggtgcagctgaagcgtgatacgcgtgaggcgtacgtgccgcggcagaacctgtttcgcgaccgcgagggagaggagcccgaggagatgcgggatcgaaagttccacgcagggcgcgagctgcggcatggcctgaatcgcgagcggttgctgcgcgaggaggactttgagcccgacgcgcgaaccgggattagtcccgcgcgcgcacacgtggcggccgccgacctggtaaccgcatacgagcagacggtgaaccaggagattaactttcaaaaaagctttaacaaccacgtgcgtacgcttgtggcgcgcgaggaggtggctataggactgatgcatctgtgggactttgtaagcgcgctggagcaaaacccaaatagcaagccgctcatggcgcagctgttccttatagtgcagcacagcagggacaacgaggcattcagggatgcgctgctaaacatagtagagcccgagggccgctggctgctcgatttgataaacatcctgcagagcatagtggtgcaggagcgcagcttgagcctggctgacaaggtggccgccatcaactattccatgcttagcctgggcaagttttacgcccgcaagatataccataccccttacgttcccatagacaaggaggtaaagatcgaggggttctacatgcgcatggcgctgaaggtgcttaccttgagcgacgacctgggcgtttatcgcaacgagcgcatccacaaggccgtgagcgtgagccggcggcgcgagctcagcgaccgcgagctgatgcacagcctgcaaagggccctggctggcacgggcagcggcgatagagaggccgagtcctactttgacgcgggcgctgacctgcgctgggccccaagccgacgcgccctggaggcagctggggccggacctgggctggcggtggcacccgcgcgcgctggcaacgtcggcggcgtggaggaatatgacgaggacgatgagtacgagccagaggacggcgagtactaagcggtgatgtttctgatcagatgatgcaagacgcaacggacccggcggtgcgggcggcgctgcagagccagccgtccggccttaactccacggacgactggcgccaggtcatggaccgcatcatgtcgctgactgcgcgcaatcctgacgcgttccggcagcagccgcaggccaaccggctctccgcaattctggaagcggtggtcccggcgcgcgcaaaccccacgcacgagaaggtgctggcgatcgtaaacgcgctggccgaaaacagggccatccggcccgacgaggccggcctggtctacgacgcgctgcttcagcgcgtggctcgttacaacagcggcaacgtgcagaccaacctggaccggctggtgggggatgtgcgcgaggccgtggcgcagcgtgagcgcgcgcagcagcagggcaacctgggctccatggttgcactaaacgccttcctgagtacacagcccgccaacgtgccgcggggacaggaggactacaccaactttgtgagcgcactgcggctaatggtgactgagacaccgcaaagtgaggtgtaccagtctgggccagactattttttccagaccagtagacaaggcctgcagaccgtaaacctgagccaggctttcaaaaacttgcaggggctgtggggggtgcgggctcccacaggcgaccgcgcgaccgtgtctagcttgctgacgcccaactcgcgcctgttgctgctgctaatagcgcccttcacggacagtggcagcgtgtcccgggacacatacctaggtcacttgctgacactgtaccgcgaggccataggtcaggcgcatgtggacgagcatactttccaggagattacaagtgtcagccgcgcgctggggcaggaggacacgggcagcctggaggcaaccctaaactacctgctgaccaaccggcggcagaagatcccctcgttgcacagtttaaacagcgaggaggagcgcattttgcgctacgtgcagcagagcgtgagccttaacctgatgcgcgacggggtaacgcccagcgtggcgctggacatgaccgcgcgcaacatggaaccgggcatgtatgcctcaaaccggccgtttatcaaccgcctaatggactacttgcatcgcgcggccgccgtgaaccccgagtatttcaccaatgccatcttgaacccgcactggctaccgccccctggtttctacaccgggggattcgaggtgcccgagggtaacgatggattcctctgggacgacatagacgacagcgtgttttccccgcaaccgcagaccctgctagagttgcaacagcgcgagcaggcagaggcggcgctgcgaaaggaaagcttccgcaggccaagcagcttgtccgatctaggcgctgcggccccgcggtcagatgctagtagcccatttccaagcttgatagggtctcttaccagcactcgcaccacccgcccgcgcctgctgggcgaggaggagtacctaaacaactcgctgctgcagccgcagcgcgaaaaaaacctgcctccggcatttcccaacaacgggatagagagcctagtggacaagatgagtagatggaagacgtacgcgcaggagcacagggacgtgccaggcccgcgcccgcccacccgtcgtcaaaggcacgaccgtcagcggggtctggtgtgggaggacgatgactcggcagacgacagcagcgtcctggatttgggagggagtggcaacccgtttgcgcaccttcgccccaggctggggagaatgttttaaaaaaaaaaaagcatgatgcaaaataaaaaactcaccaaggccatggcaccgagcgttggttttcttgtattccccttagtatgcggcgcgcggcgatgtatgaggaaggtcctcctccctcctacgagagtgtggtgagcgcggcgccagtggcggcggcgctgggttctcccttcgatgctcccctggacccgccgtttgtgcctccgcggtacctgcggcctaccggggggagaaacagcatccgttactctgagttggcacccctattcgacaccacccgtgtgtacctggtggacaacaagtcaacggatgtggcatccctgaactaccagaacgaccacagcaactttctgaccacggtcattcaaaacaatgactacagcccgggggaggcaagcacacagaccatcaatcttgacgaccggtcgcactggggcggcgacctgaaaaccatcctgcataccaacatgccaaatgtgaacgagttcatgtttaccaataagtttaaggcgcgggtgatggtgtcgcgcttgcctactaaggacaatcaggtggagctgaaatacgagtgggtggagttcacgctgcccgagggcaactactccgagaccatgaccatagaccttatgaacaacgcgatcgtggagcactacttgaaagtgggcagacagaacggggttctggaaagcgacatcggggtaaagtttgacacccgcaacttcagactggggtttgaccccgtcactggtcttgtcatgcctggggtatatacaaacgaagccttccatccagacatcattttgctgccaggatgcggggtggacttcacccacagccgcctgagcaacttgttgggcatccgcaagcggcaacccttccaggagggctttaggatcacctacgatgatctggagggtggtaacattcccgcactgttggatgtggacgcctaccaggcgagcttgaaagatgacaccgaacagggcgggggtggcgcaggcggcagcaacagcagtggcagcggcgcggaagagaactccaacgcggcagccgcggcaatgcagccggtggaggacatgaacgatcatgccattcgcggcgacacctttgccacacgggctgaggagaagcgcgctgaggccgaagcagcggccgaagctgccgcccccgctgcgcaacccgaggtcgagaagcctcagaagaaaccggtgatcaaacccctgacagaggacagcaagaaacgcagttacaacctaataagcaatgacagcaccttcacccagtaccgcagctggtaccttgcatacaactacggcgaccctcagaccggaatccgctcatggaccctgctttgcactcctgacgtaacctgcggctcggagcaggtctactggtcgttgccagacatgatgcaagaccccgtgaccttccgctccacgcgccagatcagcaactttccggtggtgggcgccgagctgttgcccgtgcactccaagagcttctacaacgaccaggccgtctactcccaactcatccgccagtttacctctctgacccacgtgttcaatcgctttcccgagaaccagattttggcgcgcccgccagcccccaccatcaccaccgtcagtgaaaacgttcctgctctcacagatcacgggacgctaccgctgcgcaacagcatcggaggagtccagcgagtgaccattactgacgccagacgccgcacctgcccctacgtttacaaggccctgggcatagtctcgccgcgcgtcctatcgagccgcactttttgagcaagcatgtccatccttatatcgcccagcaataacacaggctggggcctgcgcttcccaagcaagatgtttggcggggccaagaagcgctccgaccaacacccagtgcgcgtgcgcgggcactaccgcgcgccctggggcgcgcacaaacgcggccgcactgggcgcaccaccgtcgatgacgccatcgacgcggtggtggaggaggcgcgcaactacacgcccacgccgccaccagtgtccacagtggacgcggccattcagaccgtggtgcgcggagcccggcgctatgctaaaatgaagagacggcggaggcgcgtagcacgtcgccaccgccgccgacccggcactgccgcccaacgcgcggcggcggccctgcttaaccgcgcacgtcgcaccggccgacgggcggccatgcgggccgctcgaaggctggccgcgggtattgtcactgtgccccccaggtccaggcgacgagcggccgccgcagcagccgcggccattagtgctatgactcagggtcgcaggggcaacgtgtattgggtgcgcgactcggttagcggcctgcgcgtgcccgtgcgcacccgccccccgcgcaactagattgcaagaaaaaactacttagactcgtactgttgtatgtatccagcggcggcggcgcgcaacgaagctatgtccaagcgcaaaatcaaagaagagatgctccaggtcatcgcgccggagatctatggccccccgaagaaggaagagcaggattacaagccccgaaagctaaagcgggtcaaaaagaaaaagaaagatgatgatgatgaacttgacgacgaggtggaactgctgcacgctaccgcgcccaggcgacgggtacagtggaaaggtcgacgcgtaaaacgtgttttgcgacccggcaccaccgtagtctttacgcccggtgagcgctccacccgcacctacaagcgcgtgtatgatgaggtgtacggcgacgaggacctgcttgagcaggccaacgagcgcctcggggagtttgcctacggaaagcggcataaggacatgctggcgttgccgctggacgagggcaacccaacacctagcctaaagcccgtaacactgcagcaggtgctgcccgcgcttgcaccgtccgaagaaaagcgcggcctaaagcgcgagtctggtgacttggcacccaccgtgcagctgatggtacccaagcgccagcgactggaagatgtcttggaaaaaatgaccgtggaacctgggctggagcccgaggtccgcgtgcggccaatcaagcaggtggcgccgggactgggcgtgcagaccgtggacgttcagatacccactaccagtagcaccagtattgccaccgccacagagggcatggagacacaaacgtccccggttgcctcagcggtggcggatgccgcggtgcaggcggtcgctgcggccgcgtccaagacctctacggaggtgcaaacggacccgtggatgtttcgcgtttcagccccccggcgcccgcgccgttcgaggaagtacggcgccgccagcgcgctactgcccgaatatgccctacatccttccattgcgcctacccccggctatcgtggctacacctaccgccccagaagacgagcaactacccgacgccgaaccaccactggaacccgccgccgccgtcgccgtcgccagcccgtgctggccccgatttccgtgcgcagggtggctcgcgaaggaggcaggaccctggtgctgccaacagcgcgctaccaccccagcatcgtttaaaagccggtctttgtggttcttgcagatatggccctcacctgccgcctccgtttcccggtgccgggattccgaggaagaatgcaccgtaggaggggcatggccggccacggcctgacgggcggcatgcgtcgtgcgcaccaccggcggcggcgcgcgtcgcaccgtcgcatgcgcggcggtatcctgcccctccttattccactgatcgccgcggcgattggcgccgtgcccggaattgcatccgtggccttgcaggcgcagagacactgattaaaaacaagttgcatgtggaaaaatcaaaataaaaagtctggactctcacgctcgcttggtcctgtaactattttgtagaatggaagacatcaactttgcgtctctggccccgcgacacggctcgcgcccgttcatgggaaactggcaagatatcggcaccagcaatatgagcggtggcgccttcagctggggctcgctgtggagcggcattaaaaatttcggttccaccgttaagaactatggcagcaaggcctggaacagcagcacaggccagatgctgagggataagttgaaagagcaaaatttccaacaaaaggtggtagatggcctggcctctggcattagcggggtggtggacctggccaaccaggcagtgcaaaataagattaacagtaagcttgatccccgccctcccgtagaggagcctccaccggccgtggagacagtgtctccagaggggcgtggcgaaaagcgtccgcgccccgacagggaagaaactctggtgacgcaaatagacgagcctccctcgtacgaggaggcactaaagcaaggcctgcccaccacccgtcccatcgcgcccatggctaccggagtgctgggccagcacacacccgtaacgctggacctgcctccccccgccgacacccagcagaaacctgtgctgccaggcccgaccgccgttgttgtaacccgtcctagccgcgcgtccctgcgccgcgccgccagcggtccgcgatcgttgcggcccgtagccagtggcaactggcaaagcacactgaacagcatcgtgggtctgggggtgcaatccctgaagcgccgacgatgcttctgatagctaacgtgtcgtatgtgtgtcatgtatgcgtccatgtcgccgccagaggagctgctgagccgccgcgcgcccgctttccaagatggctaccccttcgatgatgccgcagtggtcttacatgcacatctcgggccaggacgcctcggagtacctgagccccgggctggtgcagtttgcccgcgccaccgagacgtacttcagcctgaataacaagtttagaaaccccacggtggcgcctacgcacgacgtgaccacagaccggtcccagcgtttgacgctgcggttcatccctgtggaccgtgaggatactgcgtactcgtacaaggcgcggttcaccctagctgtgggtgataaccgtgtgctggacatggcttccacgtactttgacatccgcggcgtgctggacaggggccctacttttaagccctactctggcactgcctacaacgccctggctcccaagggtgccccaaatccttgcgaatgggatgaagctgctactgctcttgaaataaacctagaagaagaggacgatgacaacgaagacgaagtagacgagcaagctgagcagcaaaaaactcacgtatttgggcaggcgccttattctggtataaatattacaaaggagggtattcaaataggtgtcgaaggtcaaacacctaaatatgccgataaaacatttcaacctgaacctcaaataggagaatctcagtggtacgaaacagaaattaatcatgcagctgggagagtcctaaaaaagactaccccaatgaaaccatgttacggttcatatgcaaaacccacaaatgaaaatggagggcaaggcattcttgtaaagcaacaaaatggaaagctagaaagtcaagtggaaatgcaatttttctcaactactgaggcagccgcaggcaatggtgataacttgactcctaaagtggtattgtacagtgaagatgtagatatagaaaccccagacactcatatttcttacatgcccactattaaggaaggtaactcacgagaactaatgggccaacaatctatgcccaacaggcctaattacattgcttttagggacaattttattggtctaatgtattacaacagcacgggtaatatgggtgttctggcgggccaagcatcgcagttgaatgctgttgtagatttgcaagacagaaacacagagctttcataccagcttttgcttgattccattggtgatagaaccaggtacttttctatgtggaatcaggctgttgacagctatgatccagatgttagaattattgaaaatcatggaactgaagatgaacttccaaattactgctttccactgggaggtgtgattaatacagagactcttaccaaggtaaaacctaaaacaggtcaggaaaatggatgggaaaaagatgctacagaattttcagataaaaatgaaataagagttggaaataattttgccatggaaatcaatctaaatgccaacctgtggagaaatttcctgtactccaacatagcgctgtatttgcccgacaagctaaagtacagtccttccaacgtaaaaatttctgataacccaaacacctacgactacatgaacaagcgagtggtggctcccgggctagtggactgctacattaaccttggagcacgctggtcccttgactatatggacaacgtcaacccatttaaccaccaccgcaatgctggcctgcgctaccgctcaatgttgctgggcaatggtcgctatgtgcccttccacatccaggtgcctcagaagttctttgccattaaaaacctccttctcctgccgggctcatacacctacgagtggaacttcaggaaggatgttaacatggttctgcagagctccctaggaaatgacctaagggttgacggagccagcattaagtttgatagcatttgcctttacgccaccttcttccccatggcccacaacaccgcctccacgcttgaggccatgcttagaaacgacaccaacgaccagtcctttaacgactatctctccgccgccaacatgctctaccctatacccgccaacgctaccaacgtgcccatatccatcccctcccgcaactgggcggctttccgcggctgggccttcacgcgccttaagactaaggaaaccccatcactgggctcgggctacgacccttattacacctactctggctctataccctacctagatggaaccttttacctcaaccacacctttaagaaggtggccattacctttgactcttctgtcagctggcctggcaatgaccgcctgcttacccccaacgagtttgaaattaagcgctcagttgacggggagggttacaacgttgcccagtgtaacatgaccaaagactggttcctggtacaaatgctagctaactataacattggctaccagggcttctatatcccagagagctacaaggaccgcatgtactccttctttagaaacttccagcccatgagccgtcaggtggtggatgatactaaatacaaggactaccaacaggtgggcatcctacaccaacacaacaactctggatttgttggctaccttgcccccaccatgcgcgaaggacaggcctaccctgctaacttcccctatccgcttataggcaagaccgcagttgacagcattacccagaaaaagtttctttgcgatcgcaccctttggcgcatcccattctccagtaactttatgtccatgggcgcactcacagacctgggccaaaaccttctctacgccaactccgcccacgcgctagacatgacttttgaggtggatcccatggacgagcccacccttctttatgttttgtttgaagtctttgacgtggtccgtgtgcaccagccgcaccgcggcgtcatcgaaaccgtgtacctgcgcacgcccttctcggccggcaacgccacaacataaagaagcaagcaacatcaacaacagctgccgccatgggctccagtgagcaggaactgaaagccattgtcaaagatcttggttgtgggccatattttttgggcacctatgacaagcgctttccaggctttgtttctccacacaagctcgcctgcgccatagtcaatacggccggtcgcgagactgggggcgtacactggatggcctttgcctggaacccgcactcaaaaacatgctacctctttgagccctttggcttttctgaccagcgactcaagcaggtttaccagtttgagtacgagtcactcctgcgccgtagcgccattgcttcttcccccgaccgctgtataacgctggaaaagtccacccaaagcgtacaggggcccaactcggccgcctgtggactattctgctgcatgtttctccacgcctttgccaactggccccaaactcccatggatcacaaccccaccatgaaccttattaccggggtacccaactccatgctcaacagtccccaggtacagcccaccctgcgtcgcaaccaggaacagctctacagcttcctggagcgccactcgccctacttccgcagccacagtgcgcagattaggagcgccacttctttttgtcacttgaaaaacatgtaaaaataatgtactagagacactttcaataaaggcaaatgcttttatttgtacactctcgggtgattatttacccccacccttgccgtctgcgccgtttaaaaatcaaaggggttctgccgcgcatcgctatgcgccactggcagggacacgttgcgatactggtgtttagtgctccacttaaactcaggcacaaccatccgcggcagctcggtgaagttttcactccacaggctgcgcaccatcaccaacgcgtttagcaggtcgggcgccgatatcttgaagtcgcagttggggcctccgccctgcgcgcgcgagttgcgatacacagggttgcagcactggaacactatcagcgccgggtggtgcacgctggccagcacgctcttgtcggagatcagatccgcgtccaggtcctccgcgttgctcagggcgaacggagtcaactttggtagctgccttcccaaaaagggcgcgtgcccaggctttgagttgcactcgcaccgtagtggcatcaaaaggtgaccgtgcccggtctgggcgttaggatacagcgcctgcataaaagccttgatctgcttaaaagccacctgagcctttgcgccttcagagaagaacatgccgcaagacttgccggaaaactgattggccggacaggccgcgtcgtgcacgcagcaccttgcgtcggtgttggagatctgcaccacatttcggccccaccggttcttcacgatcttggccttgctagactgctccttcagcgcgcgctgcccgttttcgctcgtcacatccatttcaatcacgtgctccttatttatcataatgcttccgtgtagacacttaagctcgccttcgatctcagcgcagcggtgcagccacaacgcgcagcccgtgggctcgtgatgcttgtaggtcacctctgcaaacgactgcaggtacgcctgcaggaatcgccccatcatcgtcacaaaggtcttgttgctggtgaaggtcagctgcaacccgcggtgctcctcgttcagccaggtcttgcatacggccgccagagcttccacttggtcaggcagtagtttgaagttcgcctttagatcgttatccacgtggtacttgtccatcagcgcgcgcgcagcctccatgcccttctcccacgcagacacgatcggcacactcagcgggttcatcaccgtaatttcactttccgcttcgctgggctcttcctcttcctcttgcgtccgcataccacgcgccactgggtcgtcttcattcagccgccgcactgtgcgcttacctcctttgccatgcttgattagcaccggtgggttgctgaaacccaccatttgtagcgccacatcttctctttcttcctcgctgtccacgattacctctggtgatggcgggcgctcgggcttgggagaagggcgcttctttttcttcttgggcgcaatggccaaatccgccgccgaggtcgatggccgcgggctgggtgtgcgcggcaccagcgcgtcttgtgatgagtcttcctcgtcctcggactcgatacgccgcctcatccgcttttttgggggcgcccggggaggcggcggcgacggggacggggacgacacgtcctccatggttgggggacgtcgcgccgcaccgcgtccgcgctcgggggtggtttcgcgctgctcctcttcccgactggccatttccttctcctataggcagaaaaagatcatggagtcagtcgagaagaaggacagcctaaccgccccctctgagttcgccaccaccgcctccaccgatgccgccaacgcgcctaccaccttccccgtcgaggcacccccgcttgaggaggaggaagtgattatcgagcaggacccaggttttgtaagcgaagacgacgaggaccgctcagtaccaacagaggataaaaagcaagaccaggacaacgcagaggcaaacgaggaacaagtcgggcggggggacgaaaggcatggcgactacctagatgtgggagacgacgtgctgttgaagcatctgcagcgccagtgcgccattatctgcgacgcgttgcaagagcgcagcgatgtgcccctcgccatagcggatgtcagccttgcctacgaacgccacctattctcaccgcgcgtaccccccaaacgccaagaaaacggcacatgcgagcccaacccgcgcctcaacttctaccccgtatttgccgtgccagaggtgcttgccacctatcacatctttttccaaaactgcaagatacccctatcctgccgtgccaaccgcagccgagcggacaagcagctggccttgcggcagggcgctgtcatacctgatatcgcctcgctcaacgaagtgccaaaaatctttgagggtcttggacgcgacgagaagcgcgcggcaaacgctctgcaacaggaaaacagcgaaaatgaaagtcactctggagtgttggtggaactcgagggtgacaacgcgcgcctagccgtactaaaacgcagcatcgaggtcacccactttgcctacccggcacttaacctaccccccaaggtcatgagcacagtcatgagtgagctgatcgtgcgccgtgcgcagcccctggagagggatgcaaatttgcaagaacaaacagaggagggcctacccgcagttggcgacgagcagctagcgcgctggcttcaaacgcgcgagcctgccgacttggaggagcgacgcaaactaatgatggccgcagtgctcgttaccgtggagcttgagtgcatgcagcggttctttgctgacccggagatgcagcgcaagctagaggaaacattgcactacacctttcgacagggctacgtacgccaggcctgcaagatctccaacgtggagctctgcaacctggtctcctaccttggaattttgcacgaaaaccgccttgggcaaaacgtgcttcattccacgctcaagggcgaggcgcgccgcgactacgtccgcgactgcgtttacttatttctatgctacacctggcagacggccatgggcgtttggcagcagtgcttggaggagtgcaacctcaaggagctgcagaaactgctaaagcaaaacttgaaggacctatggacggccttcaacgagcgctccgtggccgcgcacctggcggacatcattttccccgaacgcctgcttaaaaccctgcaacagggtctgccagacttcaccagtcaaagcatgttgcagaactttaggaactttatcctagagcgctcaggaatcttgcccgccacctgctgtgcacttcctagcgactttgtgcccattaagtaccgcgaatgccctccgccgctttggggccactgctaccttctgcagctagccaactaccttgcctaccactctgacataatggaagacgtgagcggtgacggtctactggagtgtcactgtcgctgcaacctatgcaccccgcaccgctccctggtttgcaattcgcagctgcttaacgaaagtcaaattatcggtacctttgagctgcagggtccctcgcctgacgaaaagtccgcggctccggggttgaaactcactccggggctgtggacgtcggcttaccttcgcaaatttgtacctgaggactaccacgcccacgagattaggttctacgaagaccaatcccgcccgcctaatgcggagcttaccgcctgcgtcattacccagggccacattcttggccaattgcaagccatcaacaaagcccgccaagagtttctgctacgaaagggacggggggtttacttggacccccagtccggcgaggagctcaacccaatccccccgccgccgcagccctatcagcagcagccgcgggcccttgcttcccaggatggcacccaaaaagaagctgcagctgccgccgccacccacggacgaggaggaatactgggacagtcaggcagaggaggttttggacgaggaggaggaggacatgatggaagactgggagagcctagacgaggaagcttccgaggtcgaagaggtgtcagacgaaacaccgtcaccctcggtcgcattcccctcgccggcgccccagaaatcggcaaccggttccagcatggctacaacctccgctcctcaggcgccgccggcactgcccgttcgccgacccaaccgtagatgggacaccactggaaccagggccggtaagtccaagcagccgccgccgttagcccaagagcaacaacagcgccaaggctaccgctcatggcgcgggcacaagaacgccatagttgcttgcttgcaagactgtgggggcaacatctccttcgcccgccgctttcttctctaccatcacggcgtggccttcccccgtaacatcctgcattactaccgtcatctctacagcccatactgcaccggcggcagcggcagcaacagcagcggccacacagaagcaaaggcgaccggatagcaagactctgacaaagcccaagaaatccacagcggcggcagcagcaggaggaggagcgctgcgtctggcgcccaacgaacccgtatcgacccgcgagcttagaaacaggatttttcccactctgtatgctatatttcaacagagcaggggccaagaacaagagctgaaaataaaaaacaggtctctgcgatccctcacccgcagctgcctgtatcacaaaagcgaagatcagcttcggcgcacgctggaagacgcggaggctctcttcagtaaatactgcgcgctgactcttaaggactagtttcgcgccctttctcaaatttaagcgcgaaaactacgtcatctccagcggccacacccggcgccagcacctgttgtcagcgccattatgagcaaggaaattcccacgccctacatgtggagttaccagccacaaatgggacttgcggctggagctgcccaagactactcaacccgaataaactacatgagcgcgggaccccacatgatatcccgggtcaacggaatacgcgcccaccgaaaccgaattctcctggaacaggcggctattaccaccacacctcgtaataaccttaatccccgtagttggcccgctgccctggtgtaccaggaaagtcccgctcccaccactgtggtacttcccagagacgcccaggccgaagttcagatgactaactcaggggcgcagcttgcgggcggctttcgtcacagggtgcggtcgcccgggcagggtataactcacctgacaatcagagggcgaggtattcagctcaacgacgagtcggtgagctcctcgcttggtctccgtccggacgggacatttcagatcggcggcgccggccgctcttcattcacgcctcgtcaggcaatcctaactctgcagacctcgtcctctgagccgcgctctggaggcattggaactctgcaatttattgaggagtttgtgccatcggtctactttaaccccttctcgggacctcccggccactatccggatcaatttattcctaactttgacgcggtaaaggactcggcggacggctacgactgaatgttaagtggagaggcagagcaactgcgcctgaaacacctggtccactgtcgccgccacaagtgctttgcccgcgactccggtgagttttgctactttgaattgcccgaggatcatatcgagggcccggcgcacggcgtccggcttaccgcccagggagagcttgcccgtagcctgattcgggagtttacccagcgccccctgctagttgagcgggacaggggaccctgtgttctcactgtgatttgcaactgtcctaaccctggattacatcaagatcctctagttaatgtcaggtcgcctaagtcgattaactagagtacccggggatcttattccctttaactaataaaaaaaaataataaagcatcacttacttaaaatcagttagcaaatttctgtccagtttattcagcagcacctccttgccctcctcccagctctggtattgcagcttcctcctggctgcaaactttctccacaatctaaatggaatgtcagtttcctcctgttcctgtccatccgcacccactatcttcatgttgttgcagatgaagcgcgcaagaccgtctgaagataccttcaaccccgtgtatccatatgacacggaaaccggtcctccaactgtgccttttcttactcctccctttgtatcccccaatgggtttcaagagagtccccctggggtactctctttgcgcctatccgaacctctagttacctccaatggcatgcttgcgctcaaaatgggcaacggcctctctctggacgaggccggcaaccttacctcccaaaatgtaaccactgtgagcccacctctcaaaaaaaccaagtcaaacataaacctggaaatatctgcacccctcacagttacctcagaagccctaactgtggctgccgccgcacctctaatggtcgcgggcaacacactcaccatgcaatcacaggccccgctaaccgtgcacgactccaaacttagcattgccacccaaggacccctcacagtgtcagaaggaaagctagccctgcaaacatcaggccccctcaccaccaccgatagcagtacccttactatcactgcctcaccccctctaactactgccactggtagcttgggcattgacttgaaagagcccatttatacacaaaatggaaaactaggactaaagtacggggctcctttgcatgtaacagacgacctaaacactttgaccgtagcaactggtccaggtgtgactattaataatacttccttgcaaactaaagttactggagccttgggttttgattcacaaggcaatatgcaacttaatgtagcaggaggactaaggattgattctcaaaacagacgccttatacttgatgttagttatccgtttgatgctcaaaaccaactaaatctaagactaggacagggccctctttttataaactcagcccacaacttggatattaactacaacaaaggcctttacttgtttacagcttcaaacaattccaaaaagcttgaggttaacctaagcactgccaaggggttgatgtttgacgctacagccatagccattaatgcaggagatgggcttgaatttggttcacctaatgcaccaaacacaaatcccctcaaaacaaaaattggccatggcctagaatttgattcaaacaaggctatggttcctaaactaggaactggccttagttttgacagcacaggtgccattacagtaggaaacaaaaataatgataagctaactttgtggaccggaataaaccctccacctaactgtcaaattgtggaaaacactaatacaaatgatggcaaacttactttagtattagtaaaaaatggagggcttgttaatggctacgtgtctctagttggtgtatcagacactgtgaaccaaatgttcacacaaaagacagcaaacatccaattaagattatattttgactcttctggaaatctattaactgaggaatcagacttaaaaattccacttaaaaataaatcttctacagcgaccagtgaaactgtagccagcagcaaagcctttatgccaagtactacagcttatcccttcaacaccactactagggatagtgaaaactacattcatggaatatgttactacatgactagttatgatagaagtctatttcccttgaacatttctataatgctaaacagccgtatgatttcttccaatgttgcctatgccatacaatttgaatggaatctaaatgcaagtgaatctccagaaagcaacatagctacgctgaccacatccccctttttcttttcttacattacagaagacgacaactaaagaatcgtttgtgttatgtttcaacgtgtttatttttcaattgcagaaaatttcaagtcatttttcattcagtagtatagccccaccaccacatagcttatacagatcaccgtaccttaatcaaactcacagaaccctagtattcaacctgccacctccctcccaacacacagagtacacagtcctttctccccggctggccttaaaaagcatcatatcatgggtaacagacatattcttaggtgttatattccacacggtttcctgtcgagccaaacgctcatcagtgatattaataaactccccgggcagctcacttaagttcatgtcgctgtccagctgctgagccacaggctgctgtccaacttgcggttgcttaacgggcggcgaaggagaagtccacgcctacatgggggtagagtcataatcgtgcatcaggatagggcggtggtgctgcagcagcgcgcgaataaactgctgccgccgccgctccgtcctgcaggaatacaacatggcagtggtctcctcagcgatgattcgcaccgcccgcagcataaggcgccttgtcctccgggcacagcagcgcaccctgatctcacttaaatcagcacagtaactgcagcacagcaccacaatattgttcaaaatcccacagtgcaaggcgctgtatccaaagctcatggcggggaccacagaacccacgtggccatcataccacaagcgcaggtagattaagtggcgacccctcataaacacgctggacataaacattacctcttttggcatgttgtaattcaccacctcccctctgattaaacatggcgccatccaccaccatcctaaaccagctggccaaaacctgcccgccggctatacactgcagggaaccgggactggaacaatgacagtggagagcccaggactcgtaaccatggatcatcatgctcgtcatgatatcaatgttggcacaacacaggcacacgtgcatacacttcctcaggattacaagctcctcccgcgttagaaccatatcccagggaacaacccattcctgaatcagcgtaaatcccacactgcagggaagacctcgcacgtaactcacgttgtgcattgtcaaagtgttacattcgggcagcagcggatgatcctccagtatggtagcgcgggtttctgtctcaaaaggaggtagacgatccctactgtacggagtgcgccgagacaaccgagatcgtgttggtcgtagtgtcatgccaaatggaacgccggacgtagtcatatttcctgaagcaaaaccaggtgcgggcgtgacaaacagatctgcgtctccggtctcgccgcttagatcgctctgtgtagtagttgtagtatatccactctctcaaagcatccaggcgccccctggcttcgggttctatgtaaactccttcatgcgccgctgccctgataacatccaccaccgcagaataagccacacccagccaacctacacattcgttctgcgagtcacacacgggaggagcgggaagagctggaagaaccatgtttttttttttattccaaaagattatccaaaacctcaaaatgaagatctattaagtgaacgcgctcccctccggtggcgtggtcaaactctacagccaaagaacagataatggcatttgtaagatgttgcacaatggcttccaaaaggcaaacggccctcacgtccaagtggacgtaaaggctaaacccttcagggtgaatctcctctataaacattccagcaccttcaaccatgcccaaataattctcatctcgccaccttctcaatatatctctaagcaaatcccgaatattaagtccggccattgtaaaaatctgctccagagcgccctccaccttcagcctcaagcagcgaatcatgattgcaaaaattcaggttcctcacagacctgtataagattcaaaagcggaacattaacaaaaataccgcgatcccgtaggtcccttcgcagggccagctgaacataatcgtgcaggtctgcacggaccagcgcggccacttccccgccaggaaccatgacaaaagaacccacactgattatgacacgcatactcggagctatgctaaccagcgtagccccgatgtaagcttgttgcatgggcggcgatataaaatgcaaggtgctgctcaaaaaatcaggcaaagcctcgcgcaaaaaagaaagcacatcgtagtcatgctcatgcagataaaggcaggtaagctccggaaccaccacagaaaaagacaccatttttctctcaaacatgtctgcgggtttctgcataaacacaaaataaaataacaaaaaaacatttaaacattagaagcctgtcttacaacaggaaaaacaacccttataagcataagacggactacggccatgccggcgtgaccgtaaaaaaactggtcaccgtgattaaaaagcaccaccgacagctcctcggtcatgtccggagtcataatgtaagactcggtaaacacatcaggttgattcacatcggtcagtgctaaaaagcgaccgaaatagcccgggggaatacatacccgcaggcgtagagacaacattacagcccccataggaggtataacaaaattaataggagagaaaaacacataaacacctgaaaaaccctcctgcctaggcaaaatagcaccctcccgctccagaacaacatacagcgcttccacagcggcagccataacagtcagccttaccagtaaaaaagaaaacctattaaaaaaacaccactcgacacggcaccagctcaatcagtcacagtgtaaaaaagggccaagtgcagagcgagtatatataggactaaaaaatgacgtaacggttaaagtccacaaaaaacacccagaaaaccgcacgcgaacctacgcccagaaacgaaagccaaaaaacccacaacttcctcaaatcgtcacttccgttttcccacgttacgtcacttcccattttaagaaaactacaattcccaacacatacaagttactccgccctaaaacctacgtcacccgccccgttcccacgccccgcgccacgtcacaaactccaccccctcattatcatattggcttcaatccaaaataaggtatattattgatgatg

SEQ ID NO: 23 - DNA, 36431 bp, Artificial Sequence
  pAdk35F2-Spike/E4orf6(CMV)-E4dlO4-7(E4re#18)
ttaattaacatcatcaataatataccttattttggattgaagccaatatgataatgagggggtggagtttgtgacgtggcgcggggcgtgggaacggggcgggtgacgtagtagtgtggcggaagtgtgatgttgcaagtgtggcggaacacatgtaagcgacggatgtggcaaaagtgacgtttttggtgtgcgccggtgtacacaggaagtgacaattttcgcgcggttttaggcggatgttgtagtaaatttgggcgtaaccgagtaagatttggccattttcgcgggaaaactgaataagaggaagtgaaatctgaataattttgtgttactcatagcgcgtaataatttctgtaatagtaatcaattacggggtcattagttcatagcccatatatggagttccgcgttacataacttacggtaaatggcccgcctggctgaccgcccaacgacccccgcccattgacgtcaataatgacgtatgttcccatagtaacgccaatagggactttccattgacgtcaatgggtggagtatttacggtaaactgcccacttggcagtacatcaagtgtatcatatgccaagtacgccccctattgacgtcaatgacggtaaatggcccgcctggcattatgcccagtacatgaccttatgggactttcctacttggcagtacatctacgtattagtcatcgctattaccatggtgatgcggttttggcagtacatcaatgggcgtggatagcggtttgactcacggggatttccaagtctccaccccattgacgtcaatgggagtttgttttggcaccaaaatcaacgggactttccaaaatgtcgtaacaactccgccccattgacgcaaatgggcggtaggcgtgtacggtgggaggtctatataagcagagctctccctatcagtgatagagatctccctatcagtgatagagatcgtcgacgagctcgtttagtgaaccgtcagatcgcctggagacgccatccacgctgttttgacctccatagaagacaccgggaccgatccagcctccgatttgccaccatgtttgtgttcctggtgctgctgccactggtgtccagccagtgtgtgaacctgaccaccaggacccaacttcctcctgcctacaccaactccttcaccaggggagtctactaccctgacaaggtgttcaggtcctctgtgctgcacagcacccaggacctgttcctgccattcttcagcaatgtgacctggttccatgccatccatgtgtctggcaccaatggcaccaagaggtttgacaaccctgtgctgccattcaatgatggagtctactttgccagcacagagaagagcaacatcatcaggggctggatttttggcaccaccctggacagcaagacccagtccctgctgattgtgaacaatgccaccaatgtggtgattaaggtgtgtgagttccagttctgtaatgacccattcctgggagtctactaccacaagaacaacaagtcctggatggagtctgagttcagggtctactcctctgccaacaactgtacctttgaatatgtgagccaaccattcctgatggacttggagggcaagcagggcaacttcaagaacctgagggagtttgtgttcaagaacattgatggctacttcaagatttacagcaaacacacaccaatcaacctggtgagggacctgccacagggcttctctgccttggaaccactggtggacctgccaattggcatcaacatcaccaggttccagaccctgctggctctgcacaggtcctacctgacacctggagactcctcctctggctggacagcaggagcagcagcctactatgtgggctacctccaaccaaggaccttcctgctgaaatacaatgagaatggcaccatcacagatgctgtggactgtgccctggacccactgtctgagaccaagtgtaccctgaaatccttcacagtggagaagggcatctaccagaccagcaacttcagggtccaaccaacagagagcattgtgaggtttccaaacatcaccaacctgtgtccatttggagaggtgttcaatgccaccaggtttgcctctgtctatgcctggaacaggaagaggattagcaactgtgtggctgactactctgtgctctacaactctgcctccttcagcaccttcaagtgttatggagtgagcccaaccaaactgaatgacctgtgtttcaccaatgtctatgctgactcctttgtgattaggggagatgaggtgagacagattgcccctggacaaacaggcaagattgctgactacaactacaaactgcctgatgacttcacaggctgtgtgattgcctggaacagcaacaacctggacagcaaggtgggaggcaactacaactacctctacagactgttcaggaagagcaacctgaaaccatttgagagggacatcagcacagagatttaccaggctggcagcacaccatgtaatggagtggagggcttcaactgttactttccactccaatcctatggcttccaaccaaccaatggagtgggctaccaaccatacagggtggtggtgctgtcctttgaactgctccatgcccctgccacagtgtgtggaccaaagaagagcaccaacctggtgaagaacaagtgtgtgaacttcaacttcaatggactgacaggcacaggagtgctgacagagagcaacaagaagttcctgccattccaacagtttggcagggacattgctgacaccacagatgctgtgagggacccacagaccttggagattctggacatcacaccatgttcctttggaggagtgtctgtgattacacctggcaccaacaccagcaaccaggtggctgtgctctaccaggatgtgaactgtactgaggtgcctgtggctatccatgctgaccaacttacaccaacctggagggtctacagcacaggcagcaatgtgttccagaccagggctggctgtctgattggagcagagcatgtgaacaactcctatgagtgtgacatcccaattggagcaggcatctgtgcctcctaccagacccagaccggtggcggtgggtcgaggtctgtggcaagccagagcatcattgcctacacaatgagtctgggagcagagaactctgtggcttacagcaacaacagcattgccatcccaaccaacttcaccatctctgtgaccacagagattctgcctgtgagtatgaccaagacctctgtggactgtacaatgtatatctgtggagacagcacagagtgtagcaacctgctgctccaatatggctccttctgtacccaacttaacagggctctgacaggcattgctgtggaacaggacaagaacacccaggaggtgtttgcccaggtgaagcagatttacaagacacctccaatcaaggactttggaggcttcaacttcagccagattctgcctgacccaagcaagccaagcaagaggtccttcattgaggacctgctgttcaacaaggtgaccctggctgatgctggcttcatcaagcaatatggagactgtctgggagacattgctgccagggacctgatttgtgcccagaagttcaatggactgacagtgctgcctccactgctgacagatgagatgattgcccaatacacctctgccctgctggctggcaccatcacctctggctggacctttggagcaggagcagccctccaaatcccatttgctatgcagatggcttacaggttcaatggcattggagtgacccagaatgtgctctatgagaaccagaaactgattgccaaccagttcaactctgccattggcaagattcaggactccctgtccagcacagcctctgccctgggcaaactccaagatgtggtgaaccagaatgcccaggctctgaacaccctggtgaagcaactttccagcaactttggagccatctcctctgtgctgaatgacatcctgagcagactggacaaggtggaggctgaggtccagattgacagactgattacaggcagactccaatccctccaaacctatgtgacccaacaacttatcagggctgctgagattagggcatctgccaacctggctgccaccaagatgagtgagtgtgtgctgggacaaagcaagagggtggacttctgtggcaagggctaccacctgatgagttttccacagtctgcccctcatggagtggtgttcctgcatgtgacctatgtgcctgcccaggagaagaacttcaccacagcccctgccatctgccatgatggcaaggctcactttccaagggagggagtgtttgtgagcaatggcacccactggtttgtgacccagaggaacttctatgaaccacagattatcaccacagacaacacctttgtgtctggcaactgtgatgtggtgattggcattgtgaacaacacagtctatgacccactccaacctgaactggactccttcaaggaggaactggacaaatacttcaagaaccacaccagccctgatgtggacctgggagacatctctggcatcaatgcctctgtggtgaacatccagaaggagattgacagactgaatgaggtggctaagaacctgaatgagtccctgattgacctccaagaactgggcaaatatgaacaatacatcaagtggccatgaaaattgatcataatcagccataccacatttgtagaggttttacttgctttaaaaaacctcccacacctccccctgaacctgaaacataaaatgaatgcaattgttgttgttaacttgtttattgcagcttataatggttacaaataaagcaatagcatcacaaatttcacaaataaagcatttttttcactgcattctagttgtggtttgtccaaactcatcaatgtatcttaacgcggatccgttacataacttacggtaaatggcccgcctggctgaccgcccaacgacccccgcccattgacgtcaataatgacgtatgttcccatagtaacgccaatagggactttccattgacgtcaatgggtggagtatttacggtaaactgcccacttggcagtacatcaagtgtatcatatgccaagtacgccccctattgacgtcaatgacggtaaatggcccgcctggcattatgcccagtacatgaccttatgggactttcctacttggcagtacatctacgtattagtcatcgctattaccatggtgatgcggttttggcagtacatcaatgggcgtggatagcggtttgactcacggggatttccaagtctccaccccattgacgtcaatgggagtttgttttggcaccaaaatcaacgggactttccaaaatgtcgtaacaactccgccccattgacgcaaatgggcggtaggcgtgtacggtgggaggtctatataagcagagctaaactaccccaagctggccaccatgactacgtccggcgttccatttggcatgacactacgaccaacacgatctcggttgtctcggcgcactccgtacagtagggatcgtctacctccttttgagacagaaacccgcgctaccatactggaggatcatccgctgctgcccgaatgtaacactttgacaatgcacaacgtgagttacgtgcgaggtcttccctgcagtgtgggatttacgctgattcaggaatgggttgttccctgggatatggttctaacgcgggaggagcttgtaatcctgaggaagtgtatgcacgtgtgcctgtgttgtgccaacattgatatcatgacgagcatgatgatccatggttacgagtcctgggctctccactgtcattgttccagtcccggttccctgcagtgtatagccggcgggcaggttttggccagctggtttaggatggtggtggatggcgccatgtttaatcagaggtttatatggtaccgggaggtggtgaattacaacatgccaaaagaggtaatgtttatgtccagcgtgtttatgaggggtcgccacttaatctacctgcgcttgtggtatgatggccacgtgggttctgtggtccccgccatgagctttggatacagcgccttgcactgtgggattttgaacaatattgtggtgctgtgctgcagttactgtgctgatttaagtgagatcagggtgcgctgctgtgcccggaggacaaggcgccttatgctgcgggcggtgcgaatcatcgctgaggagaccactgccatgttgtattcctgcaggacggagcggcggcggcagcagtttattcgcgcgctgctgcagcaccaccgccctatcctgatgcacgattatgactctacccccatgtagaagcttggggatcaattctctagagctcgctgatcagcctcgactgtgccttctagttgccagccatctgttgtttgcccctcccccgtgccttccttgaccctggaaggtgccactcccactgtcctttcctaataaaatgaggaaattgcatcgcattgtctgagtaggtgtcattctattctggggggtggggtggggcaggacagcaagggggaggattgggaagacaatagcaggcatgctggggatgcggtgggctctatggcttctgaggaaattgggcgtggcttaagggtgggaaagaatatataaggtgggggtcttatgtagttttgtatctgttttgcagcagccgccgccgccatgagcaccaactcgtttgatggaagcattgtgagctcatatttgacaacgcgcatgcccccatgggccggggtgcgtcagaatgtgatgggctccagcattgatggtcgccccgtcctgcccgcaaactctactaccttgacctacgagaccgtgtctggaacgccgttggagactgcagcctccgccgccgcttcagccgctgcagccaccgcccgcgggattgtgactgactttgctttcctgagcccgcttgcaagcagtgcagcttcccgttcatccgcccgcgatgacaagttgacggctcttttggcacaattggattctttgacccgggaacttaatgtcgtttctcagcagctgttggatctgcgccagcaggtttctgccctgaaggcttcctcccctcccaatgcggtttaaaacataaataaaaaaccagactctgtttggatttggatcaagcaagtgtcttgctgtctttatttaggggttttgcgcgcgcggtaggcccgggaccagcggtctcggtcgttgagggtcctgtgtattttttccaggacgtggtaaaggtgactctggatgttcagatacatgggcataagcccgtctctggggtggaggtagcaccactgcagagcttcatgctgcggggtggtgttgtagatgatccagtcgtagcaggagcgctgggcgtggtgcctaaaaatgtctttcagtagcaagctgattgccaggggcaggcccttggtgtaagtgtttacaaagcggttaagctgggatgggtgcatacgtggggatatgagatgcatcttggactgtatttttaggttggctatgttcccagccatatccctccggggattcatgttgtgcagaaccaccagcacagtgtatccggtgcacttgggaaatttgtcatgtagcttagaaggaaatgcgtggaagaacttggagacgcccttgtgacctccaagattttccatgcattcgtccataatgatggcaatgggcccacgggcggcggcctgggcgaagatatttctgggatcactaacgtcatagttgtgttccaggatgagatcgtcataggccatttttacaaagcgcgggcggagggtgccagactgcggtataatggttccatccggcccaggggcgtagttaccctcacagatttgcatttcccacgctttgagttcagatggggggatcatgtctacctgcggggcgatgaagaaaacggtttccggggtaggggagatcagctgggaagaaagcaggttcctgagcagctgcgacttaccgcagccggtgggcccgtaaatcacacctattaccgggtgcaactggtagttaagagagctgcagctgccgtcatccctgagcaggggggccacttcgttaagcatgtccctgactcgcatgttttccctgaccaaatccgccagaaggcgctcgccgcccagcgatagcagttcttgcaaggaagcaaagtttttcaacggtttgagaccgtccgccgtaggcatgcttttgagcgtttgaccaagcagttccaggcggtcccacagctcggtcacctgctctacggcatctcgatccagcatatctcctcgtttcgcgggttggggcggctttcgctgtacggcagtagtcggtgctcgtccagacgggccagggtcatgtctttccacgggcgcagggtcctcgtcagcgtagtctgggtcacggtgaaggggtgcgctccgggctgcgcgctggccagggtgcgcttgaggctggtcctgctggtgctgaagcgctgccggtcttcgccctgcgcgtcggccaggtagcatttgaccatggtgtcatagtccagcccctccgcggcgtggcccttggcgcgcagcttgcccttggaggaggcgccgcacgaggggcagtgcagacttttgagggcgtagagcttgggcgcgagaaataccgattccggggagtaggcatccgcgccgcaggccccgcagacggtctcgcattccacgagccaggtgagctctggccgttcggggtcaaaaaccaggtttcccccatgctttttgatgcgtttcttacctctggtttccatgagccggtgtccacgctcggtgacgaaaaggctgtccgtgtccccgtatacagacttgagaggcctgtcctcgagcggtgttccgcggtcctcctcgtatagaaactcggaccactctgagacaaaggctcgcgtccaggccagcacgaaggaggctaagtgggaggggtagcggtcgttgtccactagggggtccactcgctccagggtgtgaagacacatgtcgccctcttcggcatcaaggaaggtgattggtttgtaggtgtaggccacgtgaccgggtgttcctgaaggggggctataaaagggggtgggggcgcgttcgtcctcactctcttccgcatcgctgtctgcgagggccagctgttggggtgagtactccctctgaaaagcgggcatgacttctgcgctaagattgtcagtttccaaaaacgaggaggatttgatattcacctggcccgcggtgatgcctttgagggtggccgcatccatctggtcagaaaagacaatctttttgttgtcaagcttggtggcaaacgacccgtagagggcgttggacagcaacttggcgatggagcgcagggtttggtttttgtcgcgatcggcgcgctccttggccgcgatgtttagctgcacgtattcgcgcgcaacgcaccgccattcgggaaagacggtggtgcgctcgtcgggcaccaggtgcacgcgccaaccgcggttgtgcagggtgacaaggtcaacgctggtggctacctctccgcgtaggcgctcgttggtccagcagaggcggccgcccttgcgcgagcagaatggcggtagggggtctagctgcgtctcgtccggggggtctgcgtccacggtaaagaccccgggcagcaggcgcgcgtcgaagtagtctatcttgcatccttgcaagtctagcgcctgctgccatgcgcgggcggcaagcgcgcgctcgtatgggttgagtgggggaccccatggcatggggtgggtgagcgcggaggcgtacatgccgcaaatgtcgtaaacgtagaggggctctctgagtattccaagatatgtagggtagcatcttccaccgcggatgctggcgcgcacgtaatcgtatagttcgtgcgagggagcgaggaggtcgggaccgaggttgctacgggcgggctgctctgctcggaagactatctgcctgaagatggcatgtgagttggatgatatggttggacgctggaagacgttgaagctggcgtctgtgagacctaccgcgtcacgcacgaaggaggcgtaggagtcgcgcagcttgttgaccagctcggcggtgacctgcacgtctagggcgcagtagtccagggtttccttgatgatgtcatacttatcctgtcccttttttttccacagctcgcggttgaggacaaactcttcgcggtctttccagtactcttggatcggaaacccgtcggcctccgaacggtaagagcctagcatgtagaactggttgacggcctggtaggcgcagcatcccttttctacgggtagcgcgtatgcctgcgcggccttccggagcgaggtgtgggtgagcgcaaaggtgtccctgaccatgactttgaggtactggtatttgaagtcagtgtcgtcgcatccgccctgctcccagagcaaaaagtccgtgcgctttttggaacgcggatttggcagggcgaaggtgacatcgttgaagagtatctttcccgcgcgaggcataaagttgcgtgtgatgcggaagggtcccggcacctcggaacggttgttaattacctgggcggcgagcacgatctcgtcaaagccgttgatgttgtggcccacaatgtaaagttccaagaagcgcgggatgcccttgatggaaggcaattttttaagttcctcgtaggtgagctcttcaggggagctgagcccgtgctctgaaagggcccagtctgcaagatgagggttggaagcgacgaatgagctccacaggtcacgggccattagcatttgcaggtggtcgcgaaaggtcctaaactggcgacctatggccattttttctggggtgatgcagtagaaggtaagcgggtcttgttcccagcggtcccatccaaggttcgcggctaggtctcgcgcggcagtcactagaggctcatctccgccgaacttcatgaccagcatgaagggcacgagctgcttcccaaaggcccccatccaagtataggtctctacatcgtaggtgacaaagagacgctcggtgcgaggatgcgagccgatcgggaagaactggatctcccgccaccaattggaggagtggctattgatgtggtgaaagtagaagtccctgcgacgggccgaacactcgtgctggcttttgtaaaaacgtgcgcagtactggcagcggtgcacgggctgtacatcctgcacgaggttgacctgacgaccgcgcacaaggaagcagagtgggaatttgagcccctcgcctggcgggtttggctggtggtcttctacttcggctgcttgtccttgaccgtctggctgctcgaggggagttacggtggatcggaccaccacgccgcgcgagcccaaagtccagatgtccgcgcgcggcggtcggagcttgatgacaacatcgcgcagatgggagctgtccatggtctggagctcccgcggcgtcaggtcaggcgggagctcctgcaggtttacctcgcatagacgggtcagggcgcgggctagatccaggtgatacctaatttccaggggctggttggtggcggcgtcgatggcttgcaagaggccgcatccccgcggcgcgactacggtaccgcgcggcgggcggtgggccgcgggggtgtccttggatgatgcatctaaaagcggtgacgcgggcgagcccccggaggtagggggggctccggacccgccgggagagggggcaggggcacgtcggcgccgcgcgcgggcaggagctggtgctgcgcgcgtaggttgctggcgaacgcgacgacgcggcggttgatctcctgaatctggcgcctctgcgtgaagacgacgggcccggtgagcttgaacctgaaagagagttcgacagaatcaatttcggtgtcgttgacggcggcctggcgcaaaatctcctgcacgtctcctgagttgtcttgataggcgatctcggccatgaactgctcgatctcttcctcctggagatctccgcgtccggctcgctccacggtggcggcgaggtcgttggaaatgcgggccatgagctgcgagaaggcgttgaggcctccctcgttccagacgcggctgtagaccacgcccccttcggcatcgcgggcgcgcatgaccacctgcgcgagattgagctccacgtgccgggcgaagacggcgtagtttcgcaggcgctgaaagaggtagttgagggtggtggcggtgtgttctgccacgaagaagtacataacccagcgtcgcaacgtggattcgttgatatcccccaaggcctcaaggcgctccatggcctcgtagaagtccacggcgaagttgaaaaactgggagttgcgcgccgacacggttaactcctcctccagaagacggatgagctcggcgacagtgtcgcgcacctcgcgctcaaaggctacaggggcctcttcttcttcttcaatctcctcttccataagggcctccccttcttcttcttctggcggcggtgggggaggggggacacggcggcgacgacggcgcaccgggaggcggtcgacaaagcgctcgatcatctccccgcggcgacggcgcatggtctcggtgacggcgcggccgttctcgcgggggcgcagttggaagacgccgcccgtcatgtcccggttatgggttggcggggggctgccatgcggcagggatacggcgctaacgatgcatctcaacaattgttgtgtaggtactccgccgccgagggacctgagcgagtccgcatcgaccggatcggaaaacctctcgagaaaggcgtctaaccagtcacagtcgcaaggtaggctgagcaccgtggcgggcggcagcgggcggcggtcggggttgtttctggcggaggtgctgctgatgatgtaattaaagtaggcggtcttgagacggcggatggtcgacagaagcaccatgtccttgggtccggcctgctgaatgcgcaggcggtcggccatgccccaggcttcgttttgacatcggcgcaggtctttgtagtagtcttgcatgagcctttctaccggcacttcttcttctccttcctcttgtcctgcatctcttgcatctatcgctgcggcggcggcggagtttggccgtaggtggcgccctcttcctcccatgcgtgtgaccccgaagcccctcatcggctgaagcagggctaggtcggcgacaacgcgctcggctaatatggcctgctgcacctgcgtgagggtagactggaagtcatccatgtccacaaagcggtggtatgcgcccgtgttgatggtgtaagtgcagttggccataacggaccagttaacggtctggtgacccggctgcgagagctcggtgtacctgagacgcgagtaagccctcgagtcaaatacgtagtcgttgcaagtccgcaccaggtactggtatcccaccaaaaagtgcggcggcggctggcggtagaggggccagcgtagggtggccggggctccgggggcgagatcttccaacataaggcgatgatatccgtagatgtacctggacatccaggtgatgccggcggcggtggtggaggcgcgcggaaagtcgcggacgcggttccagatgttgcgcagcggcaaaaagtgctccatggtcgggacgctctggccggtcaggcgcgcgcaatcgttgacgctctagcgtgcaaaaggagagcctgtaagcgggcactcttccgtggtctggtggataaattcgcaagggtatcatggcggacgaccggggttcgagccccgtatccggccgtccgccgtgatccatgcggttaccgcccgcgtgtcgaacccaggtgtgcgacgtcagacaacgggggagtgctccttttggcttccttccaggcgcggcggctgctgcgctagcttttttggccactggccgcgcgcagcgtaagcggttaggctggaaagcgaaagcattaagtggctcgctccctgtagccggagggttattttccaagggttgagtcgcgggacccccggttcgagtctcggaccggccggactgcggcgaacgggggtttgcctccccgtcatgcaagaccccgcttgcaaattcctccggaaacagggacgagccccttttttgcttttcccagatgcatccggtgctgcggcagatgcgcccccctcctcagcagcggcaagagcaagagcagcggcagacatgcagggcaccctcccctcctcctaccgcgtcaggaggggcgacatccgcggttgacgcggcagcagatggtgattacgaacccccgcggcgccgggcccggcactacctggacttggaggagggcgagggcctggcgcggctaggagcgccctctcctgagcggcacccaagggtgcagctgaagcgtgatacgcgtgaggcgtacgtgccgcggcagaacctgtttcgcgaccgcgagggagaggagcccgaggagatgcgggatcgaaagttccacgcagggcgcgagctgcggcatggcctgaatcgcgagcggttgctgcgcgaggaggactttgagcccgacgcgcgaaccgggattagtcccgcgcgcgcacacgtggcggccgccgacctggtaaccgcatacgagcagacggtgaaccaggagattaactttcaaaaaagctttaacaaccacgtgcgtacgcttgtggcgcgcgaggaggtggctataggactgatgcatctgtgggactttgtaagcgcgctggagcaaaacccaaatagcaagccgctcatggcgcagctgttccttatagtgcagcacagcagggacaacgaggcattcagggatgcgctgctaaacatagtagagcccgagggccgctggctgctcgatttgataaacatcctgcagagcatagtggtgcaggagcgcagcttgagcctggctgacaaggtggccgccatcaactattccatgcttagcctgggcaagttttacgcccgcaagatataccataccccttacgttcccatagacaaggaggtaaagatcgaggggttctacatgcgcatggcgctgaaggtgcttaccttgagcgacgacctgggcgtttatcgcaacgagcgcatccacaaggccgtgagcgtgagccggcggcgcgagctcagcgaccgcgagctgatgcacagcctgcaaagggccctggctggcacgggcagcggcgatagagaggccgagtcctactttgacgcgggcgctgacctgcgctgggccccaagccgacgcgccctggaggcagctggggccggacctgggctggcggtggcacccgcgcgcgctggcaacgtcggcggcgtggaggaatatgacgaggacgatgagtacgagccagaggacggcgagtactaagcggtgatgtttctgatcagatgatgcaagacgcaacggacccggcggtgcgggcggcgctgcagagccagccgtccggccttaactccacggacgactggcgccaggtcatggaccgcatcatgtcgctgactgcgcgcaatcctgacgcgttccggcagcagccgcaggccaaccggctctccgcaattctggaagcggtggtcccggcgcgcgcaaaccccacgcacgagaaggtgctggcgatcgtaaacgcgctggccgaaaacagggccatccggcccgacgaggccggcctggtctacgacgcgctgcttcagcgcgtggctcgttacaacagcggcaacgtgcagaccaacctggaccggctggtgggggatgtgcgcgaggccgtggcgcagcgtgagcgcgcgcagcagcagggcaacctgggctccatggttgcactaaacgccttcctgagtacacagcccgccaacgtgccgcggggacaggaggactacaccaactttgtgagcgcactgcggctaatggtgactgagacaccgcaaagtgaggtgtaccagtctgggccagactattttttccagaccagtagacaaggcctgcagaccgtaaacctgagccaggctttcaaaaacttgcaggggctgtggggggtgcgggctcccacaggcgaccgcgcgaccgtgtctagcttgctgacgcccaactcgcgcctgttgctgctgctaatagcgcccttcacggacagtggcagcgtgtcccgggacacatacctaggtcacttgctgacactgtaccgcgaggccataggtcaggcgcatgtggacgagcatactttccaggagattacaagtgtcagccgcgcgctggggcaggaggacacgggcagcctggaggcaaccctaaactacctgctgaccaaccggcggcagaagatcccctcgttgcacagtttaaacagcgaggaggagcgcattttgcgctacgtgcagcagagcgtgagccttaacctgatgcgcgacggggtaacgcccagcgtggcgctggacatgaccgcgcgcaacatggaaccgggcatgtatgcctcaaaccggccgtttatcaaccgcctaatggactacttgcatcgcgcggccgccgtgaaccccgagtatttcaccaatgccatcttgaacccgcactggctaccgccccctggtttctacaccgggggattcgaggtgcccgagggtaacgatggattcctctgggacgacatagacgacagcgtgttttccccgcaaccgcagaccctgctagagttgcaacagcgcgagcaggcagaggcggcgctgcgaaaggaaagcttccgcaggccaagcagcttgtccgatctaggcgctgcggccccgcggtcagatgctagtagcccatttccaagcttgatagggtctcttaccagcactcgcaccacccgcccgcgcctgctgggcgaggaggagtacctaaacaactcgctgctgcagccgcagcgcgaaaaaaacctgcctccggcatttcccaacaacgggatagagagcctagtggacaagatgagtagatggaagacgtacgcgcaggagcacagggacgtgccaggcccgcgcccgcccacccgtcgtcaaaggcacgaccgtcagcggggtctggtgtgggaggacgatgactcggcagacgacagcagcgtcctggatttgggagggagtggcaacccgtttgcgcaccttcgccccaggctggggagaatgttttaaaaaaaaaaaagcatgatgcaaaataaaaaactcaccaaggccatggcaccgagcgttggttttcttgtattccccttagtatgcggcgcgcggcgatgtatgaggaaggtcctcctccctcctacgagagtgtggtgagcgcggcgccagtggcggcggcgctgggttctcccttcgatgctcccctggacccgccgtttgtgcctccgcggtacctgcggcctaccggggggagaaacagcatccgttactctgagttggcacccctattcgacaccacccgtgtgtacctggtggacaacaagtcaacggatgtggcatccctgaactaccagaacgaccacagcaactttctgaccacggtcattcaaaacaatgactacagcccgggggaggcaagcacacagaccatcaatcttgacgaccggtcgcactggggcggcgacctgaaaaccatcctgcataccaacatgccaaatgtgaacgagttcatgtttaccaataagtttaaggcgcgggtgatggtgtcgcgcttgcctactaaggacaatcaggtggagctgaaatacgagtgggtggagttcacgctgcccgagggcaactactccgagaccatgaccatagaccttatgaacaacgcgatcgtggagcactacttgaaagtgggcagacagaacggggttctggaaagcgacatcggggtaaagtttgacacccgcaacttcagactggggtttgaccccgtcactggtcttgtcatgcctggggtatatacaaacgaagccttccatccagacatcattttgctgccaggatgcggggtggacttcacccacagccgcctgagcaacttgttgggcatccgcaagcggcaacccttccaggagggctttaggatcacctacgatgatctggagggtggtaacattcccgcactgttggatgtggacgcctaccaggcgagcttgaaagatgacaccgaacagggcgggggtggcgcaggcggcagcaacagcagtggcagcggcgcggaagagaactccaacgcggcagccgcggcaatgcagccggtggaggacatgaacgatcatgccattcgcggcgacacctttgccacacgggctgaggagaagcgcgctgaggccgaagcagcggccgaagctgccgcccccgctgcgcaacccgaggtcgagaagcctcagaagaaaccggtgatcaaacccctgacagaggacagcaagaaacgcagttacaacctaataagcaatgacagcaccttcacccagtaccgcagctggtaccttgcatacaactacggcgaccctcagaccggaatccgctcatggaccctgctttgcactcctgacgtaacctgcggctcggagcaggtctactggtcgttgccagacatgatgcaagaccccgtgaccttccgctccacgcgccagatcagcaactttccggtggtgggcgccgagctgttgcccgtgcactccaagagcttctacaacgaccaggccgtctactcccaactcatccgccagtttacctctctgacccacgtgttcaatcgctttcccgagaaccagattttggcgcgcccgccagcccccaccatcaccaccgtcagtgaaaacgttcctgctctcacagatcacgggacgctaccgctgcgcaacagcatcggaggagtccagcgagtgaccattactgacgccagacgccgcacctgcccctacgtttacaaggccctgggcatagtctcgccgcgcgtcctatcgagccgcactttttgagcaagcatgtccatccttatatcgcccagcaataacacaggctggggcctgcgcttcccaagcaagatgtttggcggggccaagaagcgctccgaccaacacccagtgcgcgtgcgcgggcactaccgcgcgccctggggcgcgcacaaacgcggccgcactgggcgcaccaccgtcgatgacgccatcgacgcggtggtggaggaggcgcgcaactacacgcccacgccgccaccagtgtccacagtggacgcggccattcagaccgtggtgcgcggagcccggcgctatgctaaaatgaagagacggcggaggcgcgtagcacgtcgccaccgccgccgacccggcactgccgcccaacgcgcggcggcggccctgcttaaccgcgcacgtcgcaccggccgacgggcggccatgcgggccgctcgaaggctggccgcgggtattgtcactgtgccccccaggtccaggcgacgagcggccgccgcagcagccgcggccattagtgctatgactcagggtcgcaggggcaacgtgtattgggtgcgcgactcggttagcggcctgcgcgtgcccgtgcgcacccgccccccgcgcaactagattgcaagaaaaaactacttagactcgtactgttgtatgtatccagcggcggcggcgcgcaacgaagctatgtccaagcgcaaaatcaaagaagagatgctccaggtcatcgcgccggagatctatggccccccgaagaaggaagagcaggattacaagccccgaaagctaaagcgggtcaaaaagaaaaagaaagatgatgatgatgaacttgacgacgaggtggaactgctgcacgctaccgcgcccaggcgacgggtacagtggaaaggtcgacgcgtaaaacgtgttttgcgacccggcaccaccgtagtctttacgcccggtgagcgctccacccgcacctacaagcgcgtgtatgatgaggtgtacggcgacgaggacctgcttgagcaggccaacgagcgcctcggggagtttgcctacggaaagcggcataaggacatgctggcgttgccgctggacgagggcaacccaacacctagcctaaagcccgtaacactgcagcaggtgctgcccgcgcttgcaccgtccgaagaaaagcgcggcctaaagcgcgagtctggtgacttggcacccaccgtgcagctgatggtacccaagcgccagcgactggaagatgtcttggaaaaaatgaccgtggaacctgggctggagcccgaggtccgcgtgcggccaatcaagcaggtggcgccgggactgggcgtgcagaccgtggacgttcagatacccactaccagtagcaccagtattgccaccgccacagagggcatggagacacaaacgtccccggttgcctcagcggtggcggatgccgcggtgcaggcggtcgctgcggccgcgtccaagacctctacggaggtgcaaacggacccgtggatgtttcgcgtttcagccccccggcgcccgcgccgttcgaggaagtacggcgccgccagcgcgctactgcccgaatatgccctacatccttccattgcgcctacccccggctatcgtggctacacctaccgccccagaagacgagcaactacccgacgccgaaccaccactggaacccgccgccgccgtcgccgtcgccagcccgtgctggccccgatttccgtgcgcagggtggctcgcgaaggaggcaggaccctggtgctgccaacagcgcgctaccaccccagcatcgtttaaaagccggtctttgtggttcttgcagatatggccctcacctgccgcctccgtttcccggtgccgggattccgaggaagaatgcaccgtaggaggggcatggccggccacggcctgacgggcggcatgcgtcgtgcgcaccaccggcggcggcgcgcgtcgcaccgtcgcatgcgcggcggtatcctgcccctccttattccactgatcgccgcggcgattggcgccgtgcccggaattgcatccgtggccttgcaggcgcagagacactgattaaaaacaagttgcatgtggaaaaatcaaaataaaaagtctggactctcacgctcgcttggtcctgtaactattttgtagaatggaagacatcaactttgcgtctctggccccgcgacacggctcgcgcccgttcatgggaaactggcaagatatcggcaccagcaatatgagcggtggcgccttcagctggggctcgctgtggagcggcattaaaaatttcggttccaccgttaagaactatggcagcaaggcctggaacagcagcacaggccagatgctgagggataagttgaaagagcaaaatttccaacaaaaggtggtagatggcctggcctctggcattagcggggtggtggacctggccaaccaggcagtgcaaaataagattaacagtaagcttgatccccgccctcccgtagaggagcctccaccggccgtggagacagtgtctccagaggggcgtggcgaaaagcgtccgcgccccgacagggaagaaactctggtgacgcaaatagacgagcctccctcgtacgaggaggcactaaagcaaggcctgcccaccacccgtcccatcgcgcccatggctaccggagtgctgggccagcacacacccgtaacgctggacctgcctccccccgccgacacccagcagaaacctgtgctgccaggcccgaccgccgttgttgtaacccgtcctagccgcgcgtccctgcgccgcgccgccagcggtccgcgatcgttgcggcccgtagccagtggcaactggcaaagcacactgaacagcatcgtgggtctgggggtgcaatccctgaagcgccgacgatgcttctgatagctaacgtgtcgtatgtgtgtcatgtatgcgtccatgtcgccgccagaggagctgctgagccgccgcgcgcccgctttccaagatggctaccccttcgatgatgccgcagtggtcttacatgcacatctcgggccaggacgcctcggagtacctgagccccgggctggtgcagtttgcccgcgccaccgagacgtacttcagcctgaataacaagtttagaaaccccacggtggcgcctacgcacgacgtgaccacagaccggtcccagcgtttgacgctgcggttcatccctgtggaccgtgaggatactgcgtactcgtacaaggcgcggttcaccctagctgtgggtgataaccgtgtgctggacatggcttccacgtactttgacatccgcggcgtgctggacaggggccctacttttaagccctactctggcactgcctacaacgccctggctcccaagggtgccccaaatccttgcgaatgggatgaagctgctactgctcttgaaataaacctagaagaagaggacgatgacaacgaagacgaagtagacgagcaagctgagcagcaaaaaactcacgtatttgggcaggcgccttattctggtataaatattacaaaggagggtattcaaataggtgtcgaaggtcaaacacctaaatatgccgataaaacatttcaacctgaacctcaaataggagaatctcagtggtacgaaacagaaattaatcatgcagctgggagagtcctaaaaaagactaccccaatgaaaccatgttacggttcatatgcaaaacccacaaatgaaaatggagggcaaggcattcttgtaaagcaacaaaatggaaagctagaaagtcaagtggaaatgcaatttttctcaactactgaggcagccgcaggcaatggtgataacttgactcctaaagtggtattgtacagtgaagatgtagatatagaaaccccagacactcatatttcttacatgcccactattaaggaaggtaactcacgagaactaatgggccaacaatctatgcccaacaggcctaattacattgcttttagggacaattttattggtctaatgtattacaacagcacgggtaatatgggtgttctggcgggccaagcatcgcagttgaatgctgttgtagatttgcaagacagaaacacagagctttcataccagcttttgcttgattccattggtgatagaaccaggtacttttctatgtggaatcaggctgttgacagctatgatccagatgttagaattattgaaaatcatggaactgaagatgaacttccaaattactgctttccactgggaggtgtgattaatacagagactcttaccaaggtaaaacctaaaacaggtcaggaaaatggatgggaaaaagatgctacagaattttcagataaaaatgaaataagagttggaaataattttgccatggaaatcaatctaaatgccaacctgtggagaaatttcctgtactccaacatagcgctgtatttgcccgacaagctaaagtacagtccttccaacgtaaaaatttctgataacccaaacacctacgactacatgaacaagcgagtggtggctcccgggctagtggactgctacattaaccttggagcacgctggtcccttgactatatggacaacgtcaacccatttaaccaccaccgcaatgctggcctgcgctaccgctcaatgttgctgggcaatggtcgctatgtgcccttccacatccaggtgcctcagaagttctttgccattaaaaacctccttctcctgccgggctcatacacctacgagtggaacttcaggaaggatgttaacatggttctgcagagctccctaggaaatgacctaagggttgacggagccagcattaagtttgatagcatttgcctttacgccaccttcttccccatggcccacaacaccgcctccacgcttgaggccatgcttagaaacgacaccaacgaccagtcctttaacgactatctctccgccgccaacatgctctaccctatacccgccaacgctaccaacgtgcccatatccatcccctcccgcaactgggcggctttccgcggctgggccttcacgcgccttaagactaaggaaaccccatcactgggctcgggctacgacccttattacacctactctggctctataccctacctagatggaaccttttacctcaaccacacctttaagaaggtggccattacctttgactcttctgtcagctggcctggcaatgaccgcctgcttacccccaacgagtttgaaattaagcgctcagttgacggggagggttacaacgttgcccagtgtaacatgaccaaagactggttcctggtacaaatgctagctaactataacattggctaccagggcttctatatcccagagagctacaaggaccgcatgtactccttctttagaaacttccagcccatgagccgtcaggtggtggatgatactaaatacaaggactaccaacaggtgggcatcctacaccaacacaacaactctggatttgttggctaccttgcccccaccatgcgcgaaggacaggcctaccctgctaacttcccctatccgcttataggcaagaccgcagttgacagcattacccagaaaaagtttctttgcgatcgcaccctttggcgcatcccattctccagtaactttatgtccatgggcgcactcacagacctgggccaaaaccttctctacgccaactccgcccacgcgctagacatgacttttgaggtggatcccatggacgagcccacccttctttatgttttgtttgaagtctttgacgtggtccgtgtgcaccagccgcaccgcggcgtcatcgaaaccgtgtacctgcgcacgcccttctcggccggcaacgccacaacataaagaagcaagcaacatcaacaacagctgccgccatgggctccagtgagcaggaactgaaagccattgtcaaagatcttggttgtgggccatattttttgggcacctatgacaagcgctttccaggctttgtttctccacacaagctcgcctgcgccatagtcaatacggccggtcgcgagactgggggcgtacactggatggcctttgcctggaacccgcactcaaaaacatgctacctctttgagccctttggcttttctgaccagcgactcaagcaggtttaccagtttgagtacgagtcactcctgcgccgtagcgccattgcttcttcccccgaccgctgtataacgctggaaaagtccacccaaagcgtacaggggcccaactcggccgcctgtggactattctgctgcatgtttctccacgcctttgccaactggccccaaactcccatggatcacaaccccaccatgaaccttattaccggggtacccaactccatgctcaacagtccccaggtacagcccaccctgcgtcgcaaccaggaacagctctacagcttcctggagcgccactcgccctacttccgcagccacagtgcgcagattaggagcgccacttctttttgtcacttgaaaaacatgtaaaaataatgtactagagacactttcaataaaggcaaatgcttttatttgtacactctcgggtgattatttacccccacccttgccgtctgcgccgtttaaaaatcaaaggggttctgccgcgcatcgctatgcgccactggcagggacacgttgcgatactggtgtttagtgctccacttaaactcaggcacaaccatccgcggcagctcggtgaagttttcactccacaggctgcgcaccatcaccaacgcgtttagcaggtcgggcgccgatatcttgaagtcgcagttggggcctccgccctgcgcgcgcgagttgcgatacacagggttgcagcactggaacactatcagcgccgggtggtgcacgctggccagcacgctcttgtcggagatcagatccgcgtccaggtcctccgcgttgctcagggcgaacggagtcaactttggtagctgccttcccaaaaagggcgcgtgcccaggctttgagttgcactcgcaccgtagtggcatcaaaaggtgaccgtgcccggtctgggcgttaggatacagcgcctgcataaaagccttgatctgcttaaaagccacctgagcctttgcgccttcagagaagaacatgccgcaagacttgccggaaaactgattggccggacaggccgcgtcgtgcacgcagcaccttgcgtcggtgttggagatctgcaccacatttcggccccaccggttcttcacgatcttggccttgctagactgctccttcagcgcgcgctgcccgttttcgctcgtcacatccatttcaatcacgtgctccttatttatcataatgcttccgtgtagacacttaagctcgccttcgatctcagcgcagcggtgcagccacaacgcgcagcccgtgggctcgtgatgcttgtaggtcacctctgcaaacgactgcaggtacgcctgcaggaatcgccccatcatcgtcacaaaggtcttgttgctggtgaaggtcagctgcaacccgcggtgctcctcgttcagccaggtcttgcatacggccgccagagcttccacttggtcaggcagtagtttgaagttcgcctttagatcgttatccacgtggtacttgtccatcagcgcgcgcgcagcctccatgcccttctcccacgcagacacgatcggcacactcagcgggttcatcaccgtaatttcactttccgcttcgctgggctcttcctcttcctcttgcgtccgcataccacgcgccactgggtcgtcttcattcagccgccgcactgtgcgcttacctcctttgccatgcttgattagcaccggtgggttgctgaaacccaccatttgtagcgccacatcttctctttcttcctcgctgtccacgattacctctggtgatggcgggcgctcgggcttgggagaagggcgcttctttttcttcttgggcgcaatggccaaatccgccgccgaggtcgatggccgcgggctgggtgtgcgcggcaccagcgcgtcttgtgatgagtcttcctcgtcctcggactcgatacgccgcctcatccgcttttttgggggcgcccggggaggcggcggcgacggggacggggacgacacgtcctccatggttgggggacgtcgcgccgcaccgcgtccgcgctcgggggtggtttcgcgctgctcctcttcccgactggccatttccttctcctataggcagaaaaagatcatggagtcagtcgagaagaaggacagcctaaccgccccctctgagttcgccaccaccgcctccaccgatgccgccaacgcgcctaccaccttccccgtcgaggcacccccgcttgaggaggaggaagtgattatcgagcaggacccaggttttgtaagcgaagacgacgaggaccgctcagtaccaacagaggataaaaagcaagaccaggacaacgcagaggcaaacgaggaacaagtcgggcggggggacgaaaggcatggcgactacctagatgtgggagacgacgtgctgttgaagcatctgcagcgccagtgcgccattatctgcgacgcgttgcaagagcgcagcgatgtgcccctcgccatagcggatgtcagccttgcctacgaacgccacctattctcaccgcgcgtaccccccaaacgccaagaaaacggcacatgcgagcccaacccgcgcctcaacttctaccccgtatttgccgtgccagaggtgcttgccacctatcacatctttttccaaaactgcaagatacccctatcctgccgtgccaaccgcagccgagcggacaagcagctggccttgcggcagggcgctgtcatacctgatatcgcctcgctcaacgaagtgccaaaaatctttgagggtcttggacgcgacgagaagcgcgcggcaaacgctctgcaacaggaaaacagcgaaaatgaaagtcactctggagtgttggtggaactcgagggtgacaacgcgcgcctagccgtactaaaacgcagcatcgaggtcacccactttgcctacccggcacttaacctaccccccaaggtcatgagcacagtcatgagtgagctgatcgtgcgccgtgcgcagcccctggagagggatgcaaatttgcaagaacaaacagaggagggcctacccgcagttggcgacgagcagctagcgcgctggcttcaaacgcgcgagcctgccgacttggaggagcgacgcaaactaatgatggccgcagtgctcgttaccgtggagcttgagtgcatgcagcggttctttgctgacccggagatgcagcgcaagctagaggaaacattgcactacacctttcgacagggctacgtacgccaggcctgcaagatctccaacgtggagctctgcaacctggtctcctaccttggaattttgcacgaaaaccgccttgggcaaaacgtgcttcattccacgctcaagggcgaggcgcgccgcgactacgtccgcgactgcgtttacttatttctatgctacacctggcagacggccatgggcgtttggcagcagtgcttggaggagtgcaacctcaaggagctgcagaaactgctaaagcaaaacttgaaggacctatggacggccttcaacgagcgctccgtggccgcgcacctggcggacatcattttccccgaacgcctgcttaaaaccctgcaacagggtctgccagacttcaccagtcaaagcatgttgcagaactttaggaactttatcctagagcgctcaggaatcttgcccgccacctgctgtgcacttcctagcgactttgtgcccattaagtaccgcgaatgccctccgccgctttggggccactgctaccttctgcagctagccaactaccttgcctaccactctgacataatggaagacgtgagcggtgacggtctactggagtgtcactgtcgctgcaacctatgcaccccgcaccgctccctggtttgcaattcgcagctgcttaacgaaagtcaaattatcggtacctttgagctgcagggtccctcgcctgacgaaaagtccgcggctccggggttgaaactcactccggggctgtggacgtcggcttaccttcgcaaatttgtacctgaggactaccacgcccacgagattaggttctacgaagaccaatcccgcccgcctaatgcggagcttaccgcctgcgtcattacccagggccacattcttggccaattgcaagccatcaacaaagcccgccaagagtttctgctacgaaagggacggggggtttacttggacccccagtccggcgaggagctcaacccaatccccccgccgccgcagccctatcagcagcagccgcgggcccttgcttcccaggatggcacccaaaaagaagctgcagctgccgccgccacccacggacgaggaggaatactgggacagtcaggcagaggaggttttggacgaggaggaggaggacatgatggaagactgggagagcctagacgaggaagcttccgaggtcgaagaggtgtcagacgaaacaccgtcaccctcggtcgcattcccctcgccggcgccccagaaatcggcaaccggttccagcatggctacaacctccgctcctcaggcgccgccggcactgcccgttcgccgacccaaccgtagatgggacaccactggaaccagggccggtaagtccaagcagccgccgccgttagcccaagagcaacaacagcgccaaggctaccgctcatggcgcgggcacaagaacgccatagttgcttgcttgcaagactgtgggggcaacatctccttcgcccgccgctttcttctctaccatcacggcgtggccttcccccgtaacatcctgcattactaccgtcatctctacagcccatactgcaccggcggcagcggcagcaacagcagcggccacacagaagcaaaggcgaccggatagcaagactctgacaaagcccaagaaatccacagcggcggcagcagcaggaggaggagcgctgcgtctggcgcccaacgaacccgtatcgacccgcgagcttagaaacaggatttttcccactctgtatgctatatttcaacagagcaggggccaagaacaagagctgaaaataaaaaacaggtctctgcgatccctcacccgcagctgcctgtatcacaaaagcgaagatcagcttcggcgcacgctggaagacgcggaggctctcttcagtaaatactgcgcgctgactcttaaggactagtttcgcgccctttctcaaatttaagcgcgaaaactacgtcatctccagcggccacacccggcgccagcacctgttgtcagcgccattatgagcaaggaaattcccacgccctacatgtggagttaccagccacaaatgggacttgcggctggagctgcccaagactactcaacccgaataaactacatgagcgcgggaccccacatgatatcccgggtcaacggaatacgcgcccaccgaaaccgaattctcctggaacaggcggctattaccaccacacctcgtaataaccttaatccccgtagttggcccgctgccctggtgtaccaggaaagtcccgctcccaccactgtggtacttcccagagacgcccaggccgaagttcagatgactaactcaggggcgcagcttgcgggcggctttcgtcacagggtgcggtcgcccgggcagggtataactcacctgacaatcagagggcgaggtattcagctcaacgacgagtcggtgagctcctcgcttggtctccgtccggacgggacatttcagatcggcggcgccggccgctcttcattcacgcctcgtcaggcaatcctaactctgcagacctcgtcctctgagccgcgctctggaggcattggaactctgcaatttattgaggagtttgtgccatcggtctactttaaccccttctcgggacctcccggccactatccggatcaatttattcctaactttgacgcggtaaaggactcggcggacggctacgactgaatgttaagtggagaggcagagcaactgcgcctgaaacacctggtccactgtcgccgccacaagtgctttgcccgcgactccggtgagttttgctactttgaattgcccgaggatcatatcgagggcccggcgcacggcgtccggcttaccgcccagggagagcttgcccgtagcctgattcgggagtttacccagcgccccctgctagttgagcgggacaggggaccctgtgttctcactgtgatttgcaactgtcctaaccctggattacatcaagatcctctagttaatgtcaggtcgcctaagtcgattaactagagtacccggggatcttattccctttaactaataaaaaaaaataataaagcatcacttacttaaaatcagttagcaaatttctgtccagtttattcagcagcacctccttgccctcctcccagctctggtattgcagcttcctcctggctgcaaactttctccacaatctaaatggaatgtcagtttcctcctgttcctgtccatccgcacccactatcttcatgttgttgcagatgaagcgcgcaagaccgtctgaagataccttcaaccccgtgtatccatatgacacggaaaccggtcctccaactgtgccttttcttactcctccctttgtatcccccaatgggtttcaagagagtccccctggggtactctctttgcgcctatccgaacctctagttacctccaatggcatgcttgcgctcaaaatgggcaacggcctctctctggacgaggccggcaaccttacctcccaaaatgtaaccactgtgagcccacctctcaaaaaaaccaagtcaaacataaacctggaaatatctgcacccctcacagttacctcagaagccctaactgtggctgccgccgcacctctaatggtcgcgggcaacacactcaccatgcaatcacaggccccgctaaccgtgcacgactccaaacttagcattgccacccaaggacccctcacagtgtcagaaggaaagctagccctgcaaacatcaggccccctcaccaccaccgatagcagtacccttactatcactgcctcaccccctctaactactgccactggtagcttgggcattgacttgaaagagcccatttatacacaaaatggaaaactaggactaaagtacggggctcctttgcatgtaacagacgacctaaacactttgaccgtagcaactggtccaggtgtgactattaataatacttccttgcaaactaaagttactggagccttgggttttgattcacaaggcaatatgcaacttaatgtagcaggaggactaaggattgattctcaaaacagacgccttatacttgatgttagttatccgtttgatgctcaaaaccaactaaatctaagactaggacagggccctctttttataaactcagcccacaacttggatattaactacaacaaaggcctttacttgtttacagcttcaaacaattccaaaaagcttgaggttaacctaagcactgccaaggggttgatgtttgacgctacagccatagccattaatgcaggagatgggcttgaatttggttcacctaatgcaccaaacacaaatcccctcaaaacaaaaattggccatggcctagaatttgattcaaacaaggctatggttcctaaactaggaactggccttagttttgacagcacaggtgccattacagtaggaaacaaaaataatgataagctaactttgtggaccggaataaaccctccacctaactgtcaaattgtggaaaacactaatacaaatgatggcaaacttactttagtattagtaaaaaatggagggcttgttaatggctacgtgtctctagttggtgtatcagacactgtgaaccaaatgttcacacaaaagacagcaaacatccaattaagattatattttgactcttctggaaatctattaactgaggaatcagacttaaaaattccacttaaaaataaatcttctacagcgaccagtgaaactgtagccagcagcaaagcctttatgccaagtactacagcttatcccttcaacaccactactagggatagtgaaaactacattcatggaatatgttactacatgactagttatgatagaagtctatttcccttgaacatttctataatgctaaacagccgtatgatttcttccaatgttgcctatgccatacaatttgaatggaatctaaatgcaagtgaatctccagaaagcaacatagctacgctgaccacatccccctttttcttttcttacattacagaagacgacaactaaagaatcgtttgtgttatgtttcaacgtgtttatttttcaattgcagaaaatttcaagtcatttttcattcagtagtatagccccaccaccacatagcttatacagatcaccgtaccttaatcaaactcacagaaccctagtattcaacctgccacctccctcccaacacacagagtacacagtcctttctccccggctggccttaaaaagcatcatatcatgggtaacagacatattcttaggtgttatattccacacggtttcctgtcgagccaaacgctcatcagtgatattaataaactccccgggcagctcacttaagttcatgtcgctgtccagctgctgagccacaggctgctgtccaacttgcggttgcttaacgggcggcgaaggagaagtccacgcctacatgggggtagagtcataatcgtgcatcaggatagggcggtggtgctgcagcagcgcgcgaataaactgctgccgccgccgctccgtcctgcaggaatacaacatggcagtggtctcctcagcgatgattcgcaccgcccgcagcataaggcgccttgtcctccgggcacagcagcgcaccctgatctcacttaaatcagcacagtaactgcagcacagcaccacaatattgttcaaaatcccacagtgcaaggcgctgtatccaaagctcatggcggggaccacagaacccacgtggccatcataccacaagcgcaggtagattaagtggcgacccctcataaacacgctggacataaacattacctcttttggcatgttgtaattcaccacctcccctctgattaaacatggcgccatccaccaccatcctaaaccagctggccaaaacctgcccgccggctatacactgcagggaaccgggactggaacaatgacagtggagagcccaggactcgtaaccatggatcatcatgctcgtcatgatatcaatgttggcacaacacaggcacacgtgcatacacttcctcaggattacaagctcctcccgcgttagaaccatatcccagggaacaacccattcctgaatcagcgtaaatcccacactgcagggaagacctcgcacgtaactcacgttgtgcattgtcaaagtgttacattcgggcagcagcggatgatcctccagtatggtagcgcgggtttctgtctcaaaaggaggtagacgatccctactgtacggagtgcgccgagacaaccgagatcgtgttggtcgtagtgtcatgccaaatggaacgccggacgtagtcatatttcctgaagcaaaaccaggtgcgggcgtgacaaacagatctgcgtctccggtctcgccgcttagatcgctctgtgtagtagttgtagtatatccactctctcaaagcatccaggcgccccctggcttcgggttctatgtaaactccttcatgcgccgctgccctgataacatccaccaccgcagaataagccacacccagccaacctacacattcgttctgcgagtcacacacgggaggagcgggaagagctggaagaaccatgtttttttttttattccaaaagattatccaaaacctcaaaatgaagatctattaagtgaacgcgctcccctccggtggcgtggtcaaactctacagccaaagaacagataatggcatttgtaagatgttgcacaatggcttccaaaaggcaaacggccctcacgtccaagtggacgtaaaggctaaacccttcagggtgaatctcctctataaacattccagcaccttcaaccatgcccaaataattctcatctcgccaccttctcaatatatctctaagcaaatcccgaatattaagtccggccattgtaaaaatctgctccagagcgccctccaccttcagcctcaagcagcgaatcatgattgcaaaaattcaggttcctcacagacctgtataagattcaaaagcggaacattaacaaaaataccgcgatcccgtaggtcccttcgcagggccagctgaacataatcgtgcaggtctgcacggaccagcgcggccacttccccgccaggaaccatgacaaaagaacccacactgattatgacacgcatactcggagctatgctaaccagcgtagccccgatgtaagcttgttgcatgggcggcgatataaaatgcaaggtgctgctcaaaaaatcaggcaaagcctcgcgcaaaaaagaaagcacatcgtagtcatgctcatgcagataaaggcaggtaagctccggaaccaccacagaaaaagacaccatttttctctcaaacatgtctgcgggtttctgcataaacacaaaataaaataacaaaaaaacatttaaacattagaagcctgtcttacaacaggaaaaacaacccttataagcataagacggactacggccatgccggcgtgaccgtaaaaaaactggtcaccgtgattaaaaagcaccaccgacagctcctcggtcatgtccggagtcataatgtaagactcggtaaacacatcaggttgattcacatcggtcagtgctaaaaagcgaccgaaatagcccgggggaatacatacccgcaggcgtagagacaacattacagcccccataggaggtataacaaaattaataggagagaaaaacacataaacacctgaaaaaccctcctgcctaggcaaaatagcaccctcccgctccagaacaacatacagcgcttccacagcggcagccataacagtcagccttaccagtaaaaaagaaaacctattaaaaaaacaccactcgacacggcaccagctcaatcagtcacagtgtaaaaaagggccaagtgcagagcgagtatatataggactaaaaaatgacgtaacggttaaagtccacaaaaaacacccagaaaaccgcacgcgaacctacgcccagaaacgaaagccaaaaaacccacaacttcctcaaatcgtcacttccgttttcccacgttacgtcacttcccattttaagaaaactacaattcccaacacatacaagttactccgccctaaaacctacgtcacccgccccgttcccacgccccgcgccacgtcacaaactccaccccctcattatcatattggcttcaatccaaaataaggtatattattgatgatg

SEQ ID NO: 24 - DNA, 36423 bp, Artificial Sequence
  pAdk35RF-Spike/E4orf6(mPGK)-E4dl355(E4re#19)
ttaattaacatcatcaataatataccttattttggattgaagccaatatgataatgagggggtggagtttgtgacgtggcgcggggcgtgggaacggggcgggtgacgtagtagtgtggcggaagtgtgatgttgcaagtgtggcggaacacatgtaagcgacggatgtggcaaaagtgacgtttttggtgtgcgccggtgtacacaggaagtgacaattttcgcgcggttttaggcggatgttgtagtaaatttgggcgtaaccgagtaagatttggccattttcgcgggaaaactgaataagaggaagtgaaatctgaataattttgtgttactcatagcgcgtaataatttgatccgcgttaagatacattgatgagtttggacaaaccacaactagaatgcagtgaaaaaaatgctttatttgtgaaatttgtgatgctattgctttatttgtaaccattataagctgcaataaacaagttaacaacaacaattgcattcattttatgtttcaggttcagggggaggtgtgggaggttttttaaagcaagtaaaacctctacaaatgtggtatggctgattatgatcaattttcatggccacttgatgtattgttcatatttgcccagttcttggaggtcaatcagggactcattcaggttcttagccacctcattcagtctgtcaatctccttctggatgttcaccacagaggcattgatgccagagatgtctcccaggtccacatcagggctggtgtggttcttgaagtatttgtccagttcctccttgaaggagtccagttcaggttggagtgggtcatagactgtgttgttcacaatgccaatcaccacatcacagttgccagacacaaaggtgttgtctgtggtgataatctgtggttcatagaagttcctctgggtcacaaaccagtgggtgccattgctcacaaacactccctcccttggaaagtgagccttgccatcatggcagatggcaggggctgtggtgaagttcttctcctgggcaggcacataggtcacatgcaggaacaccactccatgaggggcagactgtggaaaactcatcaggtggtagcccttgccacagaagtccaccctcttgctttgtcccagcacacactcactcatcttggtggcagccaggttggcagatgccctaatctcagcagccctgataagttgttgggtcacataggtttggagggattggagtctgcctgtaatcagtctgtcaatctggacctcagcctccaccttgtccagtctgctcaggatgtcattcagcacagaggagatggctccaaagttgctggaaagttgcttcaccagggtgttcagagcctgggcattctggttcaccacatcttggagtttgcccagggcagaggctgtgctggacagggagtcctgaatcttgccaatggcagagttgaactggttggcaatcagtttctggttctcatagagcacattctgggtcactccaatgccattgaacctgtaagccatctgcatagcaaatgggatttggagggctgctcctgctccaaaggtccagccagaggtgatggtgccagccagcagggcagaggtgtattgggcaatcatctcatctgtcagcagtggaggcagcactgtcagtccattgaacttctgggcacaaatcaggtccctggcagcaatgtctcccagacagtctccatattgcttgatgaagccagcatcagccagggtcaccttgttgaacagcaggtcctcaatgaaggacctcttgcttggcttgcttgggtcaggcagaatctggctgaagttgaagcctccaaagtccttgattggaggtgtcttgtaaatctgcttcacctgggcaaacacctcctgggtgttcttgtcctgttccacagcaatgcctgtcagagccctgttaagttgggtacagaaggagccatattggagcagcaggttgctacactctgtgctgtctccacagatatacattgtacagtccacagaggtcttggtcatactcacaggcagaatctctgtggtcacagagatggtgaagttggttgggatggcaatgctgttgttgctgtaagccacagagttctctgctcccagactcattgtgtaggcaatgatgctctggcttgccacagacctcgacccaccgccaccggtctgggtctggtaggaggcacagatgcctgctccaattgggatgtcacactcataggagttgttcacatgctctgctccaatcagacagccagccctggtctggaacacattgctgcctgtgctgtagaccctccaggttggtgtaagttggtcagcatggatagccacaggcacctcagtacagttcacatcctggtagagcacagccacctggttgctggtgttggtgccaggtgtaatcacagacactcctccaaaggaacatggtgtgatgtccagaatctccaaggtctgtgggtccctcacagcatctgtggtgtcagcaatgtccctgccaaactgttggaatggcaggaacttcttgttgctctctgtcagcactcctgtgcctgtcagtccattgaagttgaagttcacacacttgttcttcaccaggttggtgctcttctttggtccacacactgtggcaggggcatggagcagttcaaaggacagcaccaccaccctgtatggttggtagcccactccattggttggttggaagccataggattggagtggaaagtaacagttgaagccctccactccattacatggtgtgctgccagcctggtaaatctctgtgctgatgtccctctcaaatggtttcaggttgctcttcctgaacagtctgtagaggtagttgtagttgcctcccaccttgctgtccaggttgttgctgttccaggcaatcacacagcctgtgaagtcatcaggcagtttgtagttgtagtcagcaatcttgcctgtttgtccaggggcaatctgtctcacctcatctcccctaatcacaaaggagtcagcatagacattggtgaaacacaggtcattcagtttggttgggctcactccataacacttgaaggtgctgaaggaggcagagttgtagagcacagagtagtcagccacacagttgctaatcctcttcctgttccaggcatagacagaggcaaacctggtggcattgaacacctctccaaatggacacaggttggtgatgtttggaaacctcacaatgctctctgttggttggaccctgaagttgctggtctggtagatgcccttctccactgtgaaggatttcagggtacacttggtctcagacagtgggtccagggcacagtccacagcatctgtgatggtgccattctcattgtatttcagcaggaaggtccttggttggaggtagcccacatagtaggctgctgctcctgctgtccagccagaggaggagtctccaggtgtcaggtaggacctgtgcagagccagcagggtctggaacctggtgatgttgatgccaattggcaggtccaccagtggttccaaggcagagaagccctgtggcaggtccctcaccaggttgattggtgtgtgtttgctgtaaatcttgaagtagccatcaatgttcttgaacacaaactccctcaggttcttgaagttgccctgcttgccctccaagtccatcaggaatggttggctcacatattcaaaggtacagttgttggcagaggagtagaccctgaactcagactccatccaggacttgttgttcttgtggtagtagactcccaggaatgggtcattacagaactggaactcacacaccttaatcaccacattggtggcattgttcacaatcagcagggactgggtcttgctgtccagggtggtgccaaaaatccagcccctgatgatgttgctcttctctgtgctggcaaagtagactccatcattgaatggcagcacagggttgtcaaacctcttggtgccattggtgccagacacatggatggcatggaaccaggtcacattgctgaagaatggcaggaacaggtcctgggtgctgtgcagcacagaggacctgaacaccttgtcagggtagtagactcccctggtgaaggagttggtgtaggcaggaggaagttgggtcctggtggtcaggttcacacactggctggacaccagtggcagcagcaccaggaacacaaacatggtggcaaatcggaggctggatcggtcccggtgtcttctatggaggtcaaaacagcgtggatggcgtctccaggcgatctgacggttcactaaacgagctcgtcgacgatctctatcactgatagggagatctctatcactgatagggagagctctgcttatatagacctcccaccgtacacgcctaccgcccatttgcgtcaatggggcggagttgttacgacattttggaaagtcccgttgattttggtgccaaaacaaactcccattgacgtcaatggggtggagacttggaaatccccgtgagtcaaaccgctatccacgcccattgatgtactgccaaaaccgcatcaccatggtaatagcgatgactaatacgtagatgtactgccaagtaggaaagtcccataaggtcatgtactgggcataatgccaggcgggccatttaccgtcattgacgtcaatagggggcgtacttggcatatgatacacttgatgtactgccaagtgggcagtttaccgtaaatactccacccattgacgtcaatggaaagtccctattggcgttactatgggaacatacgtcattattgacgtcaatgggcgggggtcgttgggcggtcagccaggcgggccatttaccgtaagttatgtaacgcggaactccatatatgggctatgaactaatgaccccgtaattgattactattacaggggtaggggaggcgcttttcccaaggcagtctggagcatgcgctttagcagccccgctgggcacttggcgctacacaagtggcctctggcctcgcacacattccacatccaccggtaggcgccaaccggctccgttctttggtggccccttcgcgccaccttctactcctcccctagtcaggaagttcccccccgccccgcagctcgcgtcgtgcaggacgtgacaaatggaagtagcacgtctcactagtctcgtgcagatggacagcaccgctgagcaatggaagcgggtaggcctttggggcagcggccaatagcagctttgctccttcgctttctgggctcagaggctgggaaggggtgggtccgggggcgggctcaggggcgggctcaggggcggggcgggcgcccgaaggtcctccggaggcccggcattctgcacgcttcaaaagcgcacgtctgccgcgctgttctcctcttcctcatctccgggcctttcgaaactaccccaagctggccaccatgactacgtccggcgttccatttggcatgacactacgaccaacacgatctcggttgtctcggcgcactccgtacagtagggatcgtctacctccttttgagacagaaacccgcgctaccatactggaggatcatccgctgctgcccgaatgtaacactttgacaatgcacaacgtgagttacgtgcgaggtcttccctgcagtgtgggatttacgctgattcaggaatgggttgttccctgggatatggttctaacgcgggaggagcttgtaatcctgaggaagtgtatgcacgtgtgcctgtgttgtgccaacattgatatcatgacgagcatgatgatccatggttacgagtcctgggctctccactgtcattgttccagtcccggttccctgcagtgtatagccggcgggcaggttttggccagctggtttaggatggtggtggatggcgccatgtttaatcagaggtttatatggtaccgggaggtggtgaattacaacatgccaaaagaggtaatgtttatgtccagcgtgtttatgaggggtcgccacttaatctacctgcgcttgtggtatgatggccacgtgggttctgtggtccccgccatgagctttggatacagcgccttgcactgtgggattttgaacaatattgtggtgctgtgctgcagttactgtgctgatttaagtgagatcagggtgcgctgctgtgcccggaggacaaggcgccttatgctgcgggcggtgcgaatcatcgctgaggagaccactgccatgttgtattcctgcaggacggagcggcggcggcagcagtttattcgcgcgctgctgcagcaccaccgccctatcctgatgcacgattatgactctacccccatgtagaagcttggggatcaattctctagagctcgctgatcagcctcgactgtgccttctagttgccagccatctgttgtttgcccctcccccgtgccttccttgaccctggaaggtgccactcccactgtcctttcctaataaaatgaggaaattgcatcgcattgtctgagtaggtgtcattctattctggggggtggggtggggcaggacagcaagggggaggattgggaagacaatagcaggcatgctggggatgcggtgggctctatggcttctgaggaaattgggcgtggcttaagggtgggaaagaatatataaggtgggggtcttatgtagttttgtatctgttttgcagcagccgccgccgccatgagcaccaactcgtttgatggaagcattgtgagctcatatttgacaacgcgcatgcccccatgggccggggtgcgtcagaatgtgatgggctccagcattgatggtcgccccgtcctgcccgcaaactctactaccttgacctacgagaccgtgtctggaacgccgttggagactgcagcctccgccgccgcttcagccgctgcagccaccgcccgcgggattgtgactgactttgctttcctgagcccgcttgcaagcagtgcagcttcccgttcatccgcccgcgatgacaagttgacggctcttttggcacaattggattctttgacccgggaacttaatgtcgtttctcagcagctgttggatctgcgccagcaggtttctgccctgaaggcttcctcccctcccaatgcggtttaaaacataaataaaaaaccagactctgtttggatttggatcaagcaagtgtcttgctgtctttatttaggggttttgcgcgcgcggtaggcccgggaccagcggtctcggtcgttgagggtcctgtgtattttttccaggacgtggtaaaggtgactctggatgttcagatacatgggcataagcccgtctctggggtggaggtagcaccactgcagagcttcatgctgcggggtggtgttgtagatgatccagtcgtagcaggagcgctgggcgtggtgcctaaaaatgtctttcagtagcaagctgattgccaggggcaggcccttggtgtaagtgtttacaaagcggttaagctgggatgggtgcatacgtggggatatgagatgcatcttggactgtatttttaggttggctatgttcccagccatatccctccggggattcatgttgtgcagaaccaccagcacagtgtatccggtgcacttgggaaatttgtcatgtagcttagaaggaaatgcgtggaagaacttggagacgcccttgtgacctccaagattttccatgcattcgtccataatgatggcaatgggcccacgggcggcggcctgggcgaagatatttctgggatcactaacgtcatagttgtgttccaggatgagatcgtcataggccatttttacaaagcgcgggcggagggtgccagactgcggtataatggttccatccggcccaggggcgtagttaccctcacagatttgcatttcccacgctttgagttcagatggggggatcatgtctacctgcggggcgatgaagaaaacggtttccggggtaggggagatcagctgggaagaaagcaggttcctgagcagctgcgacttaccgcagccggtgggcccgtaaatcacacctattaccgggtgcaactggtagttaagagagctgcagctgccgtcatccctgagcaggggggccacttcgttaagcatgtccctgactcgcatgttttccctgaccaaatccgccagaaggcgctcgccgcccagcgatagcagttcttgcaaggaagcaaagtttttcaacggtttgagaccgtccgccgtaggcatgcttttgagcgtttgaccaagcagttccaggcggtcccacagctcggtcacctgctctacggcatctcgatccagcatatctcctcgtttcgcgggttggggcggctttcgctgtacggcagtagtcggtgctcgtccagacgggccagggtcatgtctttccacgggcgcagggtcctcgtcagcgtagtctgggtcacggtgaaggggtgcgctccgggctgcgcgctggccagggtgcgcttgaggctggtcctgctggtgctgaagcgctgccggtcttcgccctgcgcgtcggccaggtagcatttgaccatggtgtcatagtccagcccctccgcggcgtggcccttggcgcgcagcttgcccttggaggaggcgccgcacgaggggcagtgcagacttttgagggcgtagagcttgggcgcgagaaataccgattccggggagtaggcatccgcgccgcaggccccgcagacggtctcgcattccacgagccaggtgagctctggccgttcggggtcaaaaaccaggtttcccccatgctttttgatgcgtttcttacctctggtttccatgagccggtgtccacgctcggtgacgaaaaggctgtccgtgtccccgtatacagacttgagaggcctgtcctcgagcggtgttccgcggtcctcctcgtatagaaactcggaccactctgagacaaaggctcgcgtccaggccagcacgaaggaggctaagtgggaggggtagcggtcgttgtccactagggggtccactcgctccagggtgtgaagacacatgtcgccctcttcggcatcaaggaaggtgattggtttgtaggtgtaggccacgtgaccgggtgttcctgaaggggggctataaaagggggtgggggcgcgttcgtcctcactctcttccgcatcgctgtctgcgagggccagctgttggggtgagtactccctctgaaaagcgggcatgacttctgcgctaagattgtcagtttccaaaaacgaggaggatttgatattcacctggcccgcggtgatgcctttgagggtggccgcatccatctggtcagaaaagacaatctttttgttgtcaagcttggtggcaaacgacccgtagagggcgttggacagcaacttggcgatggagcgcagggtttggtttttgtcgcgatcggcgcgctccttggccgcgatgtttagctgcacgtattcgcgcgcaacgcaccgccattcgggaaagacggtggtgcgctcgtcgggcaccaggtgcacgcgccaaccgcggttgtgcagggtgacaaggtcaacgctggtggctacctctccgcgtaggcgctcgttggtccagcagaggcggccgcccttgcgcgagcagaatggcggtagggggtctagctgcgtctcgtccggggggtctgcgtccacggtaaagaccccgggcagcaggcgcgcgtcgaagtagtctatcttgcatccttgcaagtctagcgcctgctgccatgcgcgggcggcaagcgcgcgctcgtatgggttgagtgggggaccccatggcatggggtgggtgagcgcggaggcgtacatgccgcaaatgtcgtaaacgtagaggggctctctgagtattccaagatatgtagggtagcatcttccaccgcggatgctggcgcgcacgtaatcgtatagttcgtgcgagggagcgaggaggtcgggaccgaggttgctacgggcgggctgctctgctcggaagactatctgcctgaagatggcatgtgagttggatgatatggttggacgctggaagacgttgaagctggcgtctgtgagacctaccgcgtcacgcacgaaggaggcgtaggagtcgcgcagcttgttgaccagctcggcggtgacctgcacgtctagggcgcagtagtccagggtttccttgatgatgtcatacttatcctgtcccttttttttccacagctcgcggttgaggacaaactcttcgcggtctttccagtactcttggatcggaaacccgtcggcctccgaacggtaagagcctagcatgtagaactggttgacggcctggtaggcgcagcatcccttttctacgggtagcgcgtatgcctgcgcggccttccggagcgaggtgtgggtgagcgcaaaggtgtccctgaccatgactttgaggtactggtatttgaagtcagtgtcgtcgcatccgccctgctcccagagcaaaaagtccgtgcgctttttggaacgcggatttggcagggcgaaggtgacatcgttgaagagtatctttcccgcgcgaggcataaagttgcgtgtgatgcggaagggtcccggcacctcggaacggttgttaattacctgggcggcgagcacgatctcgtcaaagccgttgatgttgtggcccacaatgtaaagttccaagaagcgcgggatgcccttgatggaaggcaattttttaagttcctcgtaggtgagctcttcaggggagctgagcccgtgctctgaaagggcccagtctgcaagatgagggttggaagcgacgaatgagctccacaggtcacgggccattagcatttgcaggtggtcgcgaaaggtcctaaactggcgacctatggccattttttctggggtgatgcagtagaaggtaagcgggtcttgttcccagcggtcccatccaaggttcgcggctaggtctcgcgcggcagtcactagaggctcatctccgccgaacttcatgaccagcatgaagggcacgagctgcttcccaaaggcccccatccaagtataggtctctacatcgtaggtgacaaagagacgctcggtgcgaggatgcgagccgatcgggaagaactggatctcccgccaccaattggaggagtggctattgatgtggtgaaagtagaagtccctgcgacgggccgaacactcgtgctggcttttgtaaaaacgtgcgcagtactggcagcggtgcacgggctgtacatcctgcacgaggttgacctgacgaccgcgcacaaggaagcagagtgggaatttgagcccctcgcctggcgggtttggctggtggtcttctacttcggctgcttgtccttgaccgtctggctgctcgaggggagttacggtggatcggaccaccacgccgcgcgagcccaaagtccagatgtccgcgcgcggcggtcggagcttgatgacaacatcgcgcagatgggagctgtccatggtctggagctcccgcggcgtcaggtcaggcgggagctcctgcaggtttacctcgcatagacgggtcagggcgcgggctagatccaggtgatacctaatttccaggggctggttggtggcggcgtcgatggcttgcaagaggccgcatccccgcggcgcgactacggtaccgcgcggcgggcggtgggccgcgggggtgtccttggatgatgcatctaaaagcggtgacgcgggcgagcccccggaggtagggggggctccggacccgccgggagagggggcaggggcacgtcggcgccgcgcgcgggcaggagctggtgctgcgcgcgtaggttgctggcgaacgcgacgacgcggcggttgatctcctgaatctggcgcctctgcgtgaagacgacgggcccggtgagcttgaacctgaaagagagttcgacagaatcaatttcggtgtcgttgacggcggcctggcgcaaaatctcctgcacgtctcctgagttgtcttgataggcgatctcggccatgaactgctcgatctcttcctcctggagatctccgcgtccggctcgctccacggtggcggcgaggtcgttggaaatgcgggccatgagctgcgagaaggcgttgaggcctccctcgttccagacgcggctgtagaccacgcccccttcggcatcgcgggcgcgcatgaccacctgcgcgagattgagctccacgtgccgggcgaagacggcgtagtttcgcaggcgctgaaagaggtagttgagggtggtggcggtgtgttctgccacgaagaagtacataacccagcgtcgcaacgtggattcgttgatatcccccaaggcctcaaggcgctccatggcctcgtagaagtccacggcgaagttgaaaaactgggagttgcgcgccgacacggttaactcctcctccagaagacggatgagctcggcgacagtgtcgcgcacctcgcgctcaaaggctacaggggcctcttcttcttcttcaatctcctcttccataagggcctccccttcttcttcttctggcggcggtgggggaggggggacacggcggcgacgacggcgcaccgggaggcggtcgacaaagcgctcgatcatctccccgcggcgacggcgcatggtctcggtgacggcgcggccgttctcgcgggggcgcagttggaagacgccgcccgtcatgtcccggttatgggttggcggggggctgccatgcggcagggatacggcgctaacgatgcatctcaacaattgttgtgtaggtactccgccgccgagggacctgagcgagtccgcatcgaccggatcggaaaacctctcgagaaaggcgtctaaccagtcacagtcgcaaggtaggctgagcaccgtggcgggcggcagcgggcggcggtcggggttgtttctggcggaggtgctgctgatgatgtaattaaagtaggcggtcttgagacggcggatggtcgacagaagcaccatgtccttgggtccggcctgctgaatgcgcaggcggtcggccatgccccaggcttcgttttgacatcggcgcaggtctttgtagtagtcttgcatgagcctttctaccggcacttcttcttctccttcctcttgtcctgcatctcttgcatctatcgctgcggcggcggcggagtttggccgtaggtggcgccctcttcctcccatgcgtgtgaccccgaagcccctcatcggctgaagcagggctaggtcggcgacaacgcgctcggctaatatggcctgctgcacctgcgtgagggtagactggaagtcatccatgtccacaaagcggtggtatgcgcccgtgttgatggtgtaagtgcagttggccataacggaccagttaacggtctggtgacccggctgcgagagctcggtgtacctgagacgcgagtaagccctcgagtcaaatacgtagtcgttgcaagtccgcaccaggtactggtatcccaccaaaaagtgcggcggcggctggcggtagaggggccagcgtagggtggccggggctccgggggcgagatcttccaacataaggcgatgatatccgtagatgtacctggacatccaggtgatgccggcggcggtggtggaggcgcgcggaaagtcgcggacgcggttccagatgttgcgcagcggcaaaaagtgctccatggtcgggacgctctggccggtcaggcgcgcgcaatcgttgacgctctagcgtgcaaaaggagagcctgtaagcgggcactcttccgtggtctggtggataaattcgcaagggtatcatggcggacgaccggggttcgagccccgtatccggccgtccgccgtgatccatgcggttaccgcccgcgtgtcgaacccaggtgtgcgacgtcagacaacgggggagtgctccttttggcttccttccaggcgcggcggctgctgcgctagcttttttggccactggccgcgcgcagcgtaagcggttaggctggaaagcgaaagcattaagtggctcgctccctgtagccggagggttattttccaagggttgagtcgcgggacccccggttcgagtctcggaccggccggactgcggcgaacgggggtttgcctccccgtcatgcaagaccccgcttgcaaattcctccggaaacagggacgagccccttttttgcttttcccagatgcatccggtgctgcggcagatgcgcccccctcctcagcagcggcaagagcaagagcagcggcagacatgcagggcaccctcccctcctcctaccgcgtcaggaggggcgacatccgcggttgacgcggcagcagatggtgattacgaacccccgcggcgccgggcccggcactacctggacttggaggagggcgagggcctggcgcggctaggagcgccctctcctgagcggcacccaagggtgcagctgaagcgtgatacgcgtgaggcgtacgtgccgcggcagaacctgtttcgcgaccgcgagggagaggagcccgaggagatgcgggatcgaaagttccacgcagggcgcgagctgcggcatggcctgaatcgcgagcggttgctgcgcgaggaggactttgagcccgacgcgcgaaccgggattagtcccgcgcgcgcacacgtggcggccgccgacctggtaaccgcatacgagcagacggtgaaccaggagattaactttcaaaaaagctttaacaaccacgtgcgtacgcttgtggcgcgcgaggaggtggctataggactgatgcatctgtgggactttgtaagcgcgctggagcaaaacccaaatagcaagccgctcatggcgcagctgttccttatagtgcagcacagcagggacaacgaggcattcagggatgcgctgctaaacatagtagagcccgagggccgctggctgctcgatttgataaacatcctgcagagcatagtggtgcaggagcgcagcttgagcctggctgacaaggtggccgccatcaactattccatgcttagcctgggcaagttttacgcccgcaagatataccataccccttacgttcccatagacaaggaggtaaagatcgaggggttctacatgcgcatggcgctgaaggtgcttaccttgagcgacgacctgggcgtttatcgcaacgagcgcatccacaaggccgtgagcgtgagccggcggcgcgagctcagcgaccgcgagctgatgcacagcctgcaaagggccctggctggcacgggcagcggcgatagagaggccgagtcctactttgacgcgggcgctgacctgcgctgggccccaagccgacgcgccctggaggcagctggggccggacctgggctggcggtggcacccgcgcgcgctggcaacgtcggcggcgtggaggaatatgacgaggacgatgagtacgagccagaggacggcgagtactaagcggtgatgtttctgatcagatgatgcaagacgcaacggacccggcggtgcgggcggcgctgcagagccagccgtccggccttaactccacggacgactggcgccaggtcatggaccgcatcatgtcgctgactgcgcgcaatcctgacgcgttccggcagcagccgcaggccaaccggctctccgcaattctggaagcggtggtcccggcgcgcgcaaaccccacgcacgagaaggtgctggcgatcgtaaacgcgctggccgaaaacagggccatccggcccgacgaggccggcctggtctacgacgcgctgcttcagcgcgtggctcgttacaacagcggcaacgtgcagaccaacctggaccggctggtgggggatgtgcgcgaggccgtggcgcagcgtgagcgcgcgcagcagcagggcaacctgggctccatggttgcactaaacgccttcctgagtacacagcccgccaacgtgccgcggggacaggaggactacaccaactttgtgagcgcactgcggctaatggtgactgagacaccgcaaagtgaggtgtaccagtctgggccagactattttttccagaccagtagacaaggcctgcagaccgtaaacctgagccaggctttcaaaaacttgcaggggctgtggggggtgcgggctcccacaggcgaccgcgcgaccgtgtctagcttgctgacgcccaactcgcgcctgttgctgctgctaatagcgcccttcacggacagtggcagcgtgtcccgggacacatacctaggtcacttgctgacactgtaccgcgaggccataggtcaggcgcatgtggacgagcatactttccaggagattacaagtgtcagccgcgcgctggggcaggaggacacgggcagcctggaggcaaccctaaactacctgctgaccaaccggcggcagaagatcccctcgttgcacagtttaaacagcgaggaggagcgcattttgcgctacgtgcagcagagcgtgagccttaacctgatgcgcgacggggtaacgcccagcgtggcgctggacatgaccgcgcgcaacatggaaccgggcatgtatgcctcaaaccggccgtttatcaaccgcctaatggactacttgcatcgcgcggccgccgtgaaccccgagtatttcaccaatgccatcttgaacccgcactggctaccgccccctggtttctacaccgggggattcgaggtgcccgagggtaacgatggattcctctgggacgacatagacgacagcgtgttttccccgcaaccgcagaccctgctagagttgcaacagcgcgagcaggcagaggcggcgctgcgaaaggaaagcttccgcaggccaagcagcttgtccgatctaggcgctgcggccccgcggtcagatgctagtagcccatttccaagcttgatagggtctcttaccagcactcgcaccacccgcccgcgcctgctgggcgaggaggagtacctaaacaactcgctgctgcagccgcagcgcgaaaaaaacctgcctccggcatttcccaacaacgggatagagagcctagtggacaagatgagtagatggaagacgtacgcgcaggagcacagggacgtgccaggcccgcgcccgcccacccgtcgtcaaaggcacgaccgtcagcggggtctggtgtgggaggacgatgactcggcagacgacagcagcgtcctggatttgggagggagtggcaacccgtttgcgcaccttcgccccaggctggggagaatgttttaaaaaaaaaaaagcatgatgcaaaataaaaaactcaccaaggccatggcaccgagcgttggttttcttgtattccccttagtatgcggcgcgcggcgatgtatgaggaaggtcctcctccctcctacgagagtgtggtgagcgcggcgccagtggcggcggcgctgggttctcccttcgatgctcccctggacccgccgtttgtgcctccgcggtacctgcggcctaccggggggagaaacagcatccgttactctgagttggcacccctattcgacaccacccgtgtgtacctggtggacaacaagtcaacggatgtggcatccctgaactaccagaacgaccacagcaactttctgaccacggtcattcaaaacaatgactacagcccgggggaggcaagcacacagaccatcaatcttgacgaccggtcgcactggggcggcgacctgaaaaccatcctgcataccaacatgccaaatgtgaacgagttcatgtttaccaataagtttaaggcgcgggtgatggtgtcgcgcttgcctactaaggacaatcaggtggagctgaaatacgagtgggtggagttcacgctgcccgagggcaactactccgagaccatgaccatagaccttatgaacaacgcgatcgtggagcactacttgaaagtgggcagacagaacggggttctggaaagcgacatcggggtaaagtttgacacccgcaacttcagactggggtttgaccccgtcactggtcttgtcatgcctggggtatatacaaacgaagccttccatccagacatcattttgctgccaggatgcggggtggacttcacccacagccgcctgagcaacttgttgggcatccgcaagcggcaacccttccaggagggctttaggatcacctacgatgatctggagggtggtaacattcccgcactgttggatgtggacgcctaccaggcgagcttgaaagatgacaccgaacagggcgggggtggcgcaggcggcagcaacagcagtggcagcggcgcggaagagaactccaacgcggcagccgcggcaatgcagccggtggaggacatgaacgatcatgccattcgcggcgacacctttgccacacgggctgaggagaagcgcgctgaggccgaagcagcggccgaagctgccgcccccgctgcgcaacccgaggtcgagaagcctcagaagaaaccggtgatcaaacccctgacagaggacagcaagaaacgcagttacaacctaataagcaatgacagcaccttcacccagtaccgcagctggtaccttgcatacaactacggcgaccctcagaccggaatccgctcatggaccctgctttgcactcctgacgtaacctgcggctcggagcaggtctactggtcgttgccagacatgatgcaagaccccgtgaccttccgctccacgcgccagatcagcaactttccggtggtgggcgccgagctgttgcccgtgcactccaagagcttctacaacgaccaggccgtctactcccaactcatccgccagtttacctctctgacccacgtgttcaatcgctttcccgagaaccagattttggcgcgcccgccagcccccaccatcaccaccgtcagtgaaaacgttcctgctctcacagatcacgggacgctaccgctgcgcaacagcatcggaggagtccagcgagtgaccattactgacgccagacgccgcacctgcccctacgtttacaaggccctgggcatagtctcgccgcgcgtcctatcgagccgcactttttgagcaagcatgtccatccttatatcgcccagcaataacacaggctggggcctgcgcttcccaagcaagatgtttggcggggccaagaagcgctccgaccaacacccagtgcgcgtgcgcgggcactaccgcgcgccctggggcgcgcacaaacgcggccgcactgggcgcaccaccgtcgatgacgccatcgacgcggtggtggaggaggcgcgcaactacacgcccacgccgccaccagtgtccacagtggacgcggccattcagaccgtggtgcgcggagcccggcgctatgctaaaatgaagagacggcggaggcgcgtagcacgtcgccaccgccgccgacccggcactgccgcccaacgcgcggcggcggccctgcttaaccgcgcacgtcgcaccggccgacgggcggccatgcgggccgctcgaaggctggccgcgggtattgtcactgtgccccccaggtccaggcgacgagcggccgccgcagcagccgcggccattagtgctatgactcagggtcgcaggggcaacgtgtattgggtgcgcgactcggttagcggcctgcgcgtgcccgtgcgcacccgccccccgcgcaactagattgcaagaaaaaactacttagactcgtactgttgtatgtatccagcggcggcggcgcgcaacgaagctatgtccaagcgcaaaatcaaagaagagatgctccaggtcatcgcgccggagatctatggccccccgaagaaggaagagcaggattacaagccccgaaagctaaagcgggtcaaaaagaaaaagaaagatgatgatgatgaacttgacgacgaggtggaactgctgcacgctaccgcgcccaggcgacgggtacagtggaaaggtcgacgcgtaaaacgtgttttgcgacccggcaccaccgtagtctttacgcccggtgagcgctccacccgcacctacaagcgcgtgtatgatgaggtgtacggcgacgaggacctgcttgagcaggccaacgagcgcctcggggagtttgcctacggaaagcggcataaggacatgctggcgttgccgctggacgagggcaacccaacacctagcctaaagcccgtaacactgcagcaggtgctgcccgcgcttgcaccgtccgaagaaaagcgcggcctaaagcgcgagtctggtgacttggcacccaccgtgcagctgatggtacccaagcgccagcgactggaagatgtcttggaaaaaatgaccgtggaacctgggctggagcccgaggtccgcgtgcggccaatcaagcaggtggcgccgggactgggcgtgcagaccgtggacgttcagatacccactaccagtagcaccagtattgccaccgccacagagggcatggagacacaaacgtccccggttgcctcagcggtggcggatgccgcggtgcaggcggtcgctgcggccgcgtccaagacctctacggaggtgcaaacggacccgtggatgtttcgcgtttcagccccccggcgcccgcgccgttcgaggaagtacggcgccgccagcgcgctactgcccgaatatgccctacatccttccattgcgcctacccccggctatcgtggctacacctaccgccccagaagacgagcaactacccgacgccgaaccaccactggaacccgccgccgccgtcgccgtcgccagcccgtgctggccccgatttccgtgcgcagggtggctcgcgaaggaggcaggaccctggtgctgccaacagcgcgctaccaccccagcatcgtttaaaagccggtctttgtggttcttgcagatatggccctcacctgccgcctccgtttcccggtgccgggattccgaggaagaatgcaccgtaggaggggcatggccggccacggcctgacgggcggcatgcgtcgtgcgcaccaccggcggcggcgcgcgtcgcaccgtcgcatgcgcggcggtatcctgcccctccttattccactgatcgccgcggcgattggcgccgtgcccggaattgcatccgtggccttgcaggcgcagagacactgattaaaaacaagttgcatgtggaaaaatcaaaataaaaagtctggactctcacgctcgcttggtcctgtaactattttgtagaatggaagacatcaactttgcgtctctggccccgcgacacggctcgcgcccgttcatgggaaactggcaagatatcggcaccagcaatatgagcggtggcgccttcagctggggctcgctgtggagcggcattaaaaatttcggttccaccgttaagaactatggcagcaaggcctggaacagcagcacaggccagatgctgagggataagttgaaagagcaaaatttccaacaaaaggtggtagatggcctggcctctggcattagcggggtggtggacctggccaaccaggcagtgcaaaataagattaacagtaagcttgatccccgccctcccgtagaggagcctccaccggccgtggagacagtgtctccagaggggcgtggcgaaaagcgtccgcgccccgacagggaagaaactctggtgacgcaaatagacgagcctccctcgtacgaggaggcactaaagcaaggcctgcccaccacccgtcccatcgcgcccatggctaccggagtgctgggccagcacacacccgtaacgctggacctgcctccccccgccgacacccagcagaaacctgtgctgccaggcccgaccgccgttgttgtaacccgtcctagccgcgcgtccctgcgccgcgccgccagcggtccgcgatcgttgcggcccgtagccagtggcaactggcaaagcacactgaacagcatcgtgggtctgggggtgcaatccctgaagcgccgacgatgcttctgatagctaacgtgtcgtatgtgtgtcatgtatgcgtccatgtcgccgccagaggagctgctgagccgccgcgcgcccgctttccaagatggctaccccttcgatgatgccgcagtggtcttacatgcacatctcgggccaggacgcctcggagtacctgagccccgggctggtgcagtttgcccgcgccaccgagacgtacttcagcctgaataacaagtttagaaaccccacggtggcgcctacgcacgacgtgaccacagaccggtcccagcgtttgacgctgcggttcatccctgtggaccgtgaggatactgcgtactcgtacaaggcgcggttcaccctagctgtgggtgataaccgtgtgctggacatggcttccacgtactttgacatccgcggcgtgctggacaggggccctacttttaagccctactctggcactgcctacaacgccctggctcccaagggtgccccaaatccttgcgaatgggatgaagctgctactgctcttgaaataaacctagaagaagaggacgatgacaacgaagacgaagtagacgagcaagctgagcagcaaaaaactcacgtatttgggcaggcgccttattctggtataaatattacaaaggagggtattcaaataggtgtcgaaggtcaaacacctaaatatgccgataaaacatttcaacctgaacctcaaataggagaatctcagtggtacgaaacagaaattaatcatgcagctgggagagtcctaaaaaagactaccccaatgaaaccatgttacggttcatatgcaaaacccacaaatgaaaatggagggcaaggcattcttgtaaagcaacaaaatggaaagctagaaagtcaagtggaaatgcaatttttctcaactactgaggcagccgcaggcaatggtgataacttgactcctaaagtggtattgtacagtgaagatgtagatatagaaaccccagacactcatatttcttacatgcccactattaaggaaggtaactcacgagaactaatgggccaacaatctatgcccaacaggcctaattacattgcttttagggacaattttattggtctaatgtattacaacagcacgggtaatatgggtgttctggcgggccaagcatcgcagttgaatgctgttgtagatttgcaagacagaaacacagagctttcataccagcttttgcttgattccattggtgatagaaccaggtacttttctatgtggaatcaggctgttgacagctatgatccagatgttagaattattgaaaatcatggaactgaagatgaacttccaaattactgctttccactgggaggtgtgattaatacagagactcttaccaaggtaaaacctaaaacaggtcaggaaaatggatgggaaaaagatgctacagaattttcagataaaaatgaaataagagttggaaataattttgccatggaaatcaatctaaatgccaacctgtggagaaatttcctgtactccaacatagcgctgtatttgcccgacaagctaaagtacagtccttccaacgtaaaaatttctgataacccaaacacctacgactacatgaacaagcgagtggtggctcccgggctagtggactgctacattaaccttggagcacgctggtcccttgactatatggacaacgtcaacccatttaaccaccaccgcaatgctggcctgcgctaccgctcaatgttgctgggcaatggtcgctatgtgcccttccacatccaggtgcctcagaagttctttgccattaaaaacctccttctcctgccgggctcatacacctacgagtggaacttcaggaaggatgttaacatggttctgcagagctccctaggaaatgacctaagggttgacggagccagcattaagtttgatagcatttgcctttacgccaccttcttccccatggcccacaacaccgcctccacgcttgaggccatgcttagaaacgacaccaacgaccagtcctttaacgactatctctccgccgccaacatgctctaccctatacccgccaacgctaccaacgtgcccatatccatcccctcccgcaactgggcggctttccgcggctgggccttcacgcgccttaagactaaggaaaccccatcactgggctcgggctacgacccttattacacctactctggctctataccctacctagatggaaccttttacctcaaccacacctttaagaaggtggccattacctttgactcttctgtcagctggcctggcaatgaccgcctgcttacccccaacgagtttgaaattaagcgctcagttgacggggagggttacaacgttgcccagtgtaacatgaccaaagactggttcctggtacaaatgctagctaactataacattggctaccagggcttctatatcccagagagctacaaggaccgcatgtactccttctttagaaacttccagcccatgagccgtcaggtggtggatgatactaaatacaaggactaccaacaggtgggcatcctacaccaacacaacaactctggatttgttggctaccttgcccccaccatgcgcgaaggacaggcctaccctgctaacttcccctatccgcttataggcaagaccgcagttgacagcattacccagaaaaagtttctttgcgatcgcaccctttggcgcatcccattctccagtaactttatgtccatgggcgcactcacagacctgggccaaaaccttctctacgccaactccgcccacgcgctagacatgacttttgaggtggatcccatggacgagcccacccttctttatgttttgtttgaagtctttgacgtggtccgtgtgcaccagccgcaccgcggcgtcatcgaaaccgtgtacctgcgcacgcccttctcggccggcaacgccacaacataaagaagcaagcaacatcaacaacagctgccgccatgggctccagtgagcaggaactgaaagccattgtcaaagatcttggttgtgggccatattttttgggcacctatgacaagcgctttccaggctttgtttctccacacaagctcgcctgcgccatagtcaatacggccggtcgcgagactgggggcgtacactggatggcctttgcctggaacccgcactcaaaaacatgctacctctttgagccctttggcttttctgaccagcgactcaagcaggtttaccagtttgagtacgagtcactcctgcgccgtagcgccattgcttcttcccccgaccgctgtataacgctggaaaagtccacccaaagcgtacaggggcccaactcggccgcctgtggactattctgctgcatgtttctccacgcctttgccaactggccccaaactcccatggatcacaaccccaccatgaaccttattaccggggtacccaactccatgctcaacagtccccaggtacagcccaccctgcgtcgcaaccaggaacagctctacagcttcctggagcgccactcgccctacttccgcagccacagtgcgcagattaggagcgccacttctttttgtcacttgaaaaacatgtaaaaataatgtactagagacactttcaataaaggcaaatgcttttatttgtacactctcgggtgattatttacccccacccttgccgtctgcgccgtttaaaaatcaaaggggttctgccgcgcatcgctatgcgccactggcagggacacgttgcgatactggtgtttagtgctccacttaaactcaggcacaaccatccgcggcagctcggtgaagttttcactccacaggctgcgcaccatcaccaacgcgtttagcaggtcgggcgccgatatcttgaagtcgcagttggggcctccgccctgcgcgcgcgagttgcgatacacagggttgcagcactggaacactatcagcgccgggtggtgcacgctggccagcacgctcttgtcggagatcagatccgcgtccaggtcctccgcgttgctcagggcgaacggagtcaactttggtagctgccttcccaaaaagggcgcgtgcccaggctttgagttgcactcgcaccgtagtggcatcaaaaggtgaccgtgcccggtctgggcgttaggatacagcgcctgcataaaagccttgatctgcttaaaagccacctgagcctttgcgccttcagagaagaacatgccgcaagacttgccggaaaactgattggccggacaggccgcgtcgtgcacgcagcaccttgcgtcggtgttggagatctgcaccacatttcggccccaccggttcttcacgatcttggccttgctagactgctccttcagcgcgcgctgcccgttttcgctcgtcacatccatttcaatcacgtgctccttatttatcataatgcttccgtgtagacacttaagctcgccttcgatctcagcgcagcggtgcagccacaacgcgcagcccgtgggctcgtgatgcttgtaggtcacctctgcaaacgactgcaggtacgcctgcaggaatcgccccatcatcgtcacaaaggtcttgttgctggtgaaggtcagctgcaacccgcggtgctcctcgttcagccaggtcttgcatacggccgccagagcttccacttggtcaggcagtagtttgaagttcgcctttagatcgttatccacgtggtacttgtccatcagcgcgcgcgcagcctccatgcccttctcccacgcagacacgatcggcacactcagcgggttcatcaccgtaatttcactttccgcttcgctgggctcttcctcttcctcttgcgtccgcataccacgcgccactgggtcgtcttcattcagccgccgcactgtgcgcttacctcctttgccatgcttgattagcaccggtgggttgctgaaacccaccatttgtagcgccacatcttctctttcttcctcgctgtccacgattacctctggtgatggcgggcgctcgggcttgggagaagggcgcttctttttcttcttgggcgcaatggccaaatccgccgccgaggtcgatggccgcgggctgggtgtgcgcggcaccagcgcgtcttgtgatgagtcttcctcgtcctcggactcgatacgccgcctcatccgcttttttgggggcgcccggggaggcggcggcgacggggacggggacgacacgtcctccatggttgggggacgtcgcgccgcaccgcgtccgcgctcgggggtggtttcgcgctgctcctcttcccgactggccatttccttctcctataggcagaaaaagatcatggagtcagtcgagaagaaggacagcctaaccgccccctctgagttcgccaccaccgcctccaccgatgccgccaacgcgcctaccaccttccccgtcgaggcacccccgcttgaggaggaggaagtgattatcgagcaggacccaggttttgtaagcgaagacgacgaggaccgctcagtaccaacagaggataaaaagcaagaccaggacaacgcagaggcaaacgaggaacaagtcgggcggggggacgaaaggcatggcgactacctagatgtgggagacgacgtgctgttgaagcatctgcagcgccagtgcgccattatctgcgacgcgttgcaagagcgcagcgatgtgcccctcgccatagcggatgtcagccttgcctacgaacgccacctattctcaccgcgcgtaccccccaaacgccaagaaaacggcacatgcgagcccaacccgcgcctcaacttctaccccgtatttgccgtgccagaggtgcttgccacctatcacatctttttccaaaactgcaagatacccctatcctgccgtgccaaccgcagccgagcggacaagcagctggccttgcggcagggcgctgtcatacctgatatcgcctcgctcaacgaagtgccaaaaatctttgagggtcttggacgcgacgagaagcgcgcggcaaacgctctgcaacaggaaaacagcgaaaatgaaagtcactctggagtgttggtggaactcgagggtgacaacgcgcgcctagccgtactaaaacgcagcatcgaggtcacccactttgcctacccggcacttaacctaccccccaaggtcatgagcacagtcatgagtgagctgatcgtgcgccgtgcgcagcccctggagagggatgcaaatttgcaagaacaaacagaggagggcctacccgcagttggcgacgagcagctagcgcgctggcttcaaacgcgcgagcctgccgacttggaggagcgacgcaaactaatgatggccgcagtgctcgttaccgtggagcttgagtgcatgcagcggttctttgctgacccggagatgcagcgcaagctagaggaaacattgcactacacctttcgacagggctacgtacgccaggcctgcaagatctccaacgtggagctctgcaacctggtctcctaccttggaattttgcacgaaaaccgccttgggcaaaacgtgcttcattccacgctcaagggcgaggcgcgccgcgactacgtccgcgactgcgtttacttatttctatgctacacctggcagacggccatgggcgtttggcagcagtgcttggaggagtgcaacctcaaggagctgcagaaactgctaaagcaaaacttgaaggacctatggacggccttcaacgagcgctccgtggccgcgcacctggcggacatcattttccccgaacgcctgcttaaaaccctgcaacagggtctgccagacttcaccagtcaaagcatgttgcagaactttaggaactttatcctagagcgctcaggaatcttgcccgccacctgctgtgcacttcctagcgactttgtgcccattaagtaccgcgaatgccctccgccgctttggggccactgctaccttctgcagctagccaactaccttgcctaccactctgacataatggaagacgtgagcggtgacggtctactggagtgtcactgtcgctgcaacctatgcaccccgcaccgctccctggtttgcaattcgcagctgcttaacgaaagtcaaattatcggtacctttgagctgcagggtccctcgcctgacgaaaagtccgcggctccggggttgaaactcactccggggctgtggacgtcggcttaccttcgcaaatttgtacctgaggactaccacgcccacgagattaggttctacgaagaccaatcccgcccgcctaatgcggagcttaccgcctgcgtcattacccagggccacattcttggccaattgcaagccatcaacaaagcccgccaagagtttctgctacgaaagggacggggggtttacttggacccccagtccggcgaggagctcaacccaatccccccgccgccgcagccctatcagcagcagccgcgggcccttgcttcccaggatggcacccaaaaagaagctgcagctgccgccgccacccacggacgaggaggaatactgggacagtcaggcagaggaggttttggacgaggaggaggaggacatgatggaagactgggagagcctagacgaggaagcttccgaggtcgaagaggtgtcagacgaaacaccgtcaccctcggtcgcattcccctcgccggcgccccagaaatcggcaaccggttccagcatggctacaacctccgctcctcaggcgccgccggcactgcccgttcgccgacccaaccgtagatgggacaccactggaaccagggccggtaagtccaagcagccgccgccgttagcccaagagcaacaacagcgccaaggctaccgctcatggcgcgggcacaagaacgccatagttgcttgcttgcaagactgtgggggcaacatctccttcgcccgccgctttcttctctaccatcacggcgtggccttcccccgtaacatcctgcattactaccgtcatctctacagcccatactgcaccggcggcagcggcagcaacagcagcggccacacagaagcaaaggcgaccggatagcaagactctgacaaagcccaagaaatccacagcggcggcagcagcaggaggaggagcgctgcgtctggcgcccaacgaacccgtatcgacccgcgagcttagaaacaggatttttcccactctgtatgctatatttcaacagagcaggggccaagaacaagagctgaaaataaaaaacaggtctctgcgatccctcacccgcagctgcctgtatcacaaaagcgaagatcagcttcggcgcacgctggaagacgcggaggctctcttcagtaaatactgcgcgctgactcttaaggactagtttcgcgccctttctcaaatttaagcgcgaaaactacgtcatctccagcggccacacccggcgccagcacctgttgtcagcgccattatgagcaaggaaattcccacgccctacatgtggagttaccagccacaaatgggacttgcggctggagctgcccaagactactcaacccgaataaactacatgagcgcgggaccccacatgatatcccgggtcaacggaatacgcgcccaccgaaaccgaattctcctggaacaggcggctattaccaccacacctcgtaataaccttaatccccgtagttggcccgctgccctggtgtaccaggaaagtcccgctcccaccactgtggtacttcccagagacgcccaggccgaagttcagatgactaactcaggggcgcagcttgcgggcggctttcgtcacagggtgcggtcgcccgggcagggtataactcacctgacaatcagagggcgaggtattcagctcaacgacgagtcggtgagctcctcgcttggtctccgtccggacgggacatttcagatcggcggcgccggccgctcttcattcacgcctcgtcaggcaatcctaactctgcagacctcgtcctctgagccgcgctctggaggcattggaactctgcaatttattgaggagtttgtgccatcggtctactttaaccccttctcgggacctcccggccactatccggatcaatttattcctaactttgacgcggtaaaggactcggcggacggctacgactgaatgttaagtggagaggcagagcaactgcgcctgaaacacctggtccactgtcgccgccacaagtgctttgcccgcgactccggtgagttttgctactttgaattgcccgaggatcatatcgagggcccggcgcacggcgtccggcttaccgcccagggagagcttgcccgtagcctgattcgggagtttacccagcgccccctgctagttgagcgggacaggggaccctgtgttctcactgtgatttgcaactgtcctaaccctggattacatcaagatcctctagttaatgtcaggtcgcctaagtcgattaactagagtacccggggatcttattccctttaactaataaaaaaaaataataaagcatcacttacttaaaatcagttagcaaatttctgtccagtttattcagcagcacctccttgccctcctcccagctctggtattgcagcttcctcctggctgcaaactttctccacaatctaaatggaatgtcagtttcctcctgttcctgtccatccgcacccactatcttcatgttgttgcagatgaagcgcgcaagaccgtctgaagataccttcaaccccgtgtatccatatgacacggaaaccggtcctccaactgtgccttttcttactcctccctttgtatcccccaatgggtttcaagagagtccccctggggtactctctttgcgcctatccgaacctctagttacctccaatggcatgcttgcgctcaaaatgggcaacggcctctctctggacgaggccggcaaccttacctcccaaaatgtaaccactgtgagcccacctctcaaaaaaaccaagtcaaacataaacctggaaatatctgcacccctcacagttacctcagaagccctaactgtggctgccgccgcacctctaatggtcgcgggcaacacactcaccatgcaatcacaggccccgctaaccgtgcacgactccaaacttagcattgccacccaaggacccctcacagtgtcagaaggaaagctagccctgcaaacatcaggccccctcaccaccaccgatagcagtacccttactatcactgcctcaccccctctaactactgccactggtagcttgggcattgacttgaaagagcccatttatacacaaaatggaaaactaggactaaagtacggggctcctttgcatgtaacagacgacctaaacactttgaccgtagcaactggtccaggtgtgactattaataatacttccttgcaaactaaagttactggagccttgggttttgattcacaaggcaatatgcaacttaatgtagcaggaggactaaggattgattctcaaaacagacgccttatacttgatgttagttatccgtttgatgctcaaaaccaactaaatctaagactaggacagggccctctttttataaactcagcccacaacttggatattaactacaacaaaggcctttacttgtttacagcttcaaacaattccaaaaagcttgaggttaacctaagcactgccaaggggttgatgtttgacgctacagccatagccattaatgcaggagatgggcttgaatttggttcacctaatgcaccaaacacaaatcccctcaaaacaaaaattggccatggcctagaatttgattcaaacaaggctatggttcctaaactaggaactggccttagttttgacagcacaggtgccattacagtaggaaacaaaaataatgataagctaactttgtggaccggaataaaccctccacctaactgtcaaattgtggaaaacactaatacaaatgatggcaaacttactttagtattagtaaaaaatggagggcttgttaatggctacgtgtctctagttggtgtatcagacactgtgaaccaaatgttcacacaaaagacagcaaacatccaattaagattatattttgactcttctggaaatctattaactgaggaatcagacttaaaaattccacttaaaaataaatcttctacagcgaccagtgaaactgtagccagcagcaaagcctttatgccaagtactacagcttatcccttcaacaccactactagggatagtgaaaactacattcatggaatatgttactacatgactagttatgatagaagtctatttcccttgaacatttctataatgctaaacagccgtatgatttcttccaatgttgcctatgccatacaatttgaatggaatctaaatgcaagtgaatctccagaaagcaacatagctacgctgaccacatccccctttttcttttcttacattacagaagacgacaactaaagaatcgtttgtgttatgtttcaacgtgtttatttttcaattgcagaaaatttcaagtcatttttcattcagtagtatagccccaccaccacatagcttatacagatcaccgtaccttaatcaaactcacagaaccctagtattcaacctgccacctccctcccaacacacagagtacacagtcctttctccccggctggccttaaaaagcatcatatcatgggtaacagacatattcttaggtgttatattccacacggtttcctgtcgagccaaacgctcatcagtgatattaataaactccccgggcagctcacttaagttcatgtcgctgtccagctgctgagccacaggctgctgtccaacttgcggttgcttaacgggcggcgaaggagaagtccacgcctacatgggggtagagtcataatcgtgcatcaggatagggcggtggtgctgcagcagcgcgcgaataaactgctgccgccgccgctccgtcctgcaggaatacaacatggcagtggtctcctcagcgatgattcgcaccgcccgcagcataaggcgccttgtcctccgggcacagcagcgcaccctgatctcacttaaatcagcacagtaactgcagcacagcaccacaatattgttcaaaatcccacagtgcaaggcgctgtatccaaagctcatggcggggaccacagaacccacgtggccatcataccacaagcgcaggtagattaagtggcgacccctcataaacacgctggacataaacattacctcttttggcatgttgtaattcaccacctcccctctgattaaacatggcgccatccaccaccatcctaaaccagctggccaaaacctgcccgccggctatacactgcagggaaccgggactggaacaatgacagtggagagcccaggactcgtaaccatggatcatcatgctcgtcatgatatcaatgttggcacaacacaggcacacgtgcatacacttcctcaggattacaagctcctcccgcgttagaaccatatcccagggaacaacccattcctgaatcagcgtaaatcccacactgcagggaagacctcgcacgtaactcacgttgtgcattgtcaaagtgttacattcgggcagcagcggatgatcctccagtatggtagcgcgggtttctgtctcaaaaggaggtagacgatccctactgtacggagtgcgccgagacaaccgagatcgtgttggtcgtagtgtcatgccaaatggaacgccggacgtagtcatatttcctgaagcaaaaccaggtgcgggcgtgacaaacagatctgcgtctccggtctcgccgcttagatcgctctgtgtagtagttgtagtatatccactctctcaaagcatccaggcgccccctggcttcgggttctatgtaaactccttcatgcgccgctgccctgataacatccaccaccgcagaataagccacacccagccaacctacacattcgttctgcgagtcacacacgggaggagcgggaagagctggaagaaccatgtttttttttttattccaaaagattatccaaaacctcaaaatgaagatctattaagtgaacgcgctcccctccggtggcgtggtcaaactctacagccaaagaacagataatggcatttgtaagatgttgcacaatggcttccaaaaggcaaacggccctcacgtccaagtggacgtaaaggctaaacccttcagggtgaatctcctctataaacattccagcaccttcaaccatgcccaaataattctcatctcgccaccttctcaatatatctctaagcaaatcccgaatattaagtccggccattgtaaaaatctgctccagagcgccctccaccttcagcctcaagcagcgaatcatgattgcaaaaattcaggttcctcacagacctgtataagattcaaaagcggaacattaacaaaaataccgcgatcccgtaggtcccttcgcagggccagctgaacataatcgtgcaggtctgcacggaccagcgcggccacttccccgccaggaaccatgacaaaagaacccacactgattatgacacgcatactcggagctatgctaaccagcgtagccccgatgtaagcttgttgcatgggcggcgatataaaatgcaaggtgctgctcaaaaaatcaggcaaagcctcgcgcaaaaaagaaagcacatcgtagtcatgctcatgcagataaaggcaggtaagctccggaaccaccacagaaaaagacaccatttttctctcaaacatgtctgcgggtttctgcataaacacaaaataaaataacaaaaaaacatttaaacattagaagcctgtcttacaacaggaaaaacaacccttataagcataagacggactacggccatgccggcgtgaccgtaaaaaaactggtcaccgtgattaaaaagcaccaccgacagctcctcggtcatgtccggagtcataatgtaagactcggtaaacacatcaggttgattcacatcggtcagtgctaaaaagcgaccgaaatagcccgggggaatacatacccgcaggcgtagagacaacattacagcccccataggaggtataacaaaattaataggagagaaaaacacataaacacctgaaaaaccctcctgcctaggcaaaatagcaccctcccgctccagaacaacatacagcgcttccacagcggcagccataacagtcagccttaccagtaaaaaagaaaacctattaaaaaaacaccactcgacacggcaccagctcaatcagtcacagtgtaaaaaagggccaagtgcagagcgagtatatataggactaaaaaatgacgtaacggttaaagtccacaaaaaacacccagaaaaccgcacgcgaacctacgcccagaaacgaaagccaaaaaacccacaacttcctcaaatcgtcacttccgttttcccacgttacgtcacttcccattttaagaaaactacaattcccaacacatacaagttactccgccctaaaacctacgtcacccgccccgttcccacgccccgcgccacgtcacaaactccaccccctcattatcatattggcttcaatccaaaataaggtatattattgatgatg

SEQ ID NO: 25 - DNA, 36150 bp, Artificial Sequence
  pAdk35RF-Spike/E4orf6(RSV)-E4dl355(E4re#20)
ttaattaacatcatcaataatataccttattttggattgaagccaatatgataatgagggggtggagtttgtgacgtggcgcggggcgtgggaacggggcgggtgacgtagtagtgtggcggaagtgtgatgttgcaagtgtggcggaacacatgtaagcgacggatgtggcaaaagtgacgtttttggtgtgcgccggtgtacacaggaagtgacaattttcgcgcggttttaggcggatgttgtagtaaatttgggcgtaaccgagtaagatttggccattttcgcgggaaaactgaataagaggaagtgaaatctgaataattttgtgttactcatagcgcgtaataatttgatccgcgttaagatacattgatgagtttggacaaaccacaactagaatgcagtgaaaaaaatgctttatttgtgaaatttgtgatgctattgctttatttgtaaccattataagctgcaataaacaagttaacaacaacaattgcattcattttatgtttcaggttcagggggaggtgtgggaggttttttaaagcaagtaaaacctctacaaatgtggtatggctgattatgatcaattttcatggccacttgatgtattgttcatatttgcccagttcttggaggtcaatcagggactcattcaggttcttagccacctcattcagtctgtcaatctccttctggatgttcaccacagaggcattgatgccagagatgtctcccaggtccacatcagggctggtgtggttcttgaagtatttgtccagttcctccttgaaggagtccagttcaggttggagtgggtcatagactgtgttgttcacaatgccaatcaccacatcacagttgccagacacaaaggtgttgtctgtggtgataatctgtggttcatagaagttcctctgggtcacaaaccagtgggtgccattgctcacaaacactccctcccttggaaagtgagccttgccatcatggcagatggcaggggctgtggtgaagttcttctcctgggcaggcacataggtcacatgcaggaacaccactccatgaggggcagactgtggaaaactcatcaggtggtagcccttgccacagaagtccaccctcttgctttgtcccagcacacactcactcatcttggtggcagccaggttggcagatgccctaatctcagcagccctgataagttgttgggtcacataggtttggagggattggagtctgcctgtaatcagtctgtcaatctggacctcagcctccaccttgtccagtctgctcaggatgtcattcagcacagaggagatggctccaaagttgctggaaagttgcttcaccagggtgttcagagcctgggcattctggttcaccacatcttggagtttgcccagggcagaggctgtgctggacagggagtcctgaatcttgccaatggcagagttgaactggttggcaatcagtttctggttctcatagagcacattctgggtcactccaatgccattgaacctgtaagccatctgcatagcaaatgggatttggagggctgctcctgctccaaaggtccagccagaggtgatggtgccagccagcagggcagaggtgtattgggcaatcatctcatctgtcagcagtggaggcagcactgtcagtccattgaacttctgggcacaaatcaggtccctggcagcaatgtctcccagacagtctccatattgcttgatgaagccagcatcagccagggtcaccttgttgaacagcaggtcctcaatgaaggacctcttgcttggcttgcttgggtcaggcagaatctggctgaagttgaagcctccaaagtccttgattggaggtgtcttgtaaatctgcttcacctgggcaaacacctcctgggtgttcttgtcctgttccacagcaatgcctgtcagagccctgttaagttgggtacagaaggagccatattggagcagcaggttgctacactctgtgctgtctccacagatatacattgtacagtccacagaggtcttggtcatactcacaggcagaatctctgtggtcacagagatggtgaagttggttgggatggcaatgctgttgttgctgtaagccacagagttctctgctcccagactcattgtgtaggcaatgatgctctggcttgccacagacctcgacccaccgccaccggtctgggtctggtaggaggcacagatgcctgctccaattgggatgtcacactcataggagttgttcacatgctctgctccaatcagacagccagccctggtctggaacacattgctgcctgtgctgtagaccctccaggttggtgtaagttggtcagcatggatagccacaggcacctcagtacagttcacatcctggtagagcacagccacctggttgctggtgttggtgccaggtgtaatcacagacactcctccaaaggaacatggtgtgatgtccagaatctccaaggtctgtgggtccctcacagcatctgtggtgtcagcaatgtccctgccaaactgttggaatggcaggaacttcttgttgctctctgtcagcactcctgtgcctgtcagtccattgaagttgaagttcacacacttgttcttcaccaggttggtgctcttctttggtccacacactgtggcaggggcatggagcagttcaaaggacagcaccaccaccctgtatggttggtagcccactccattggttggttggaagccataggattggagtggaaagtaacagttgaagccctccactccattacatggtgtgctgccagcctggtaaatctctgtgctgatgtccctctcaaatggtttcaggttgctcttcctgaacagtctgtagaggtagttgtagttgcctcccaccttgctgtccaggttgttgctgttccaggcaatcacacagcctgtgaagtcatcaggcagtttgtagttgtagtcagcaatcttgcctgtttgtccaggggcaatctgtctcacctcatctcccctaatcacaaaggagtcagcatagacattggtgaaacacaggtcattcagtttggttgggctcactccataacacttgaaggtgctgaaggaggcagagttgtagagcacagagtagtcagccacacagttgctaatcctcttcctgttccaggcatagacagaggcaaacctggtggcattgaacacctctccaaatggacacaggttggtgatgtttggaaacctcacaatgctctctgttggttggaccctgaagttgctggtctggtagatgcccttctccactgtgaaggatttcagggtacacttggtctcagacagtgggtccagggcacagtccacagcatctgtgatggtgccattctcattgtatttcagcaggaaggtccttggttggaggtagcccacatagtaggctgctgctcctgctgtccagccagaggaggagtctccaggtgtcaggtaggacctgtgcagagccagcagggtctggaacctggtgatgttgatgccaattggcaggtccaccagtggttccaaggcagagaagccctgtggcaggtccctcaccaggttgattggtgtgtgtttgctgtaaatcttgaagtagccatcaatgttcttgaacacaaactccctcaggttcttgaagttgccctgcttgccctccaagtccatcaggaatggttggctcacatattcaaaggtacagttgttggcagaggagtagaccctgaactcagactccatccaggacttgttgttcttgtggtagtagactcccaggaatgggtcattacagaactggaactcacacaccttaatcaccacattggtggcattgttcacaatcagcagggactgggtcttgctgtccagggtggtgccaaaaatccagcccctgatgatgttgctcttctctgtgctggcaaagtagactccatcattgaatggcagcacagggttgtcaaacctcttggtgccattggtgccagacacatggatggcatggaaccaggtcacattgctgaagaatggcaggaacaggtcctgggtgctgtgcagcacagaggacctgaacaccttgtcagggtagtagactcccctggtgaaggagttggtgtaggcaggaggaagttgggtcctggtggtcaggttcacacactggctggacaccagtggcagcagcaccaggaacacaaacatggtggcaaatcggaggctggatcggtcccggtgtcttctatggaggtcaaaacagcgtggatggcgtctccaggcgatctgacggttcactaaacgagctcgtcgacgatctctatcactgatagggagatctctatcactgatagggagagctctgcttatatagacctcccaccgtacacgcctaccgcccatttgcgtcaatggggcggagttgttacgacattttggaaagtcccgttgattttggtgccaaaacaaactcccattgacgtcaatggggtggagacttggaaatccccgtgagtcaaaccgctatccacgcccattgatgtactgccaaaaccgcatcaccatggtaatagcgatgactaatacgtagatgtactgccaagtaggaaagtcccataaggtcatgtactgggcataatgccaggcgggccatttaccgtcattgacgtcaatagggggcgtacttggcatatgatacacttgatgtactgccaagtgggcagtttaccgtaaatactccacccattgacgtcaatggaaagtccctattggcgttactatgggaacatacgtcattattgacgtcaatgggcgggggtcgttgggcggtcagccaggcgggccatttaccgtaagttatgtaacgcggaactccatatatgggctatgaactaatgaccccgtaattgattactattacagtgtagtcttatgcaatactcttgtagtcttgcaacatggtaacgatgagttagcaacatgccttacaaggagagaaaaagcaccgtgcatgccgattggtggaagtaaggtggtacgatcgtgccttattaggaaggcaacagacgggtctgacatggattggacgaaccactgaattgccgcattgcagagatattgtatttaagtgcctagctcgatacataaacaaactaccccaagctggccaccatgactacgtccggcgttccatttggcatgacactacgaccaacacgatctcggttgtctcggcgcactccgtacagtagggatcgtctacctccttttgagacagaaacccgcgctaccatactggaggatcatccgctgctgcccgaatgtaacactttgacaatgcacaacgtgagttacgtgcgaggtcttccctgcagtgtgggatttacgctgattcaggaatgggttgttccctgggatatggttctaacgcgggaggagcttgtaatcctgaggaagtgtatgcacgtgtgcctgtgttgtgccaacattgatatcatgacgagcatgatgatccatggttacgagtcctgggctctccactgtcattgttccagtcccggttccctgcagtgtatagccggcgggcaggttttggccagctggtttaggatggtggtggatggcgccatgtttaatcagaggtttatatggtaccgggaggtggtgaattacaacatgccaaaagaggtaatgtttatgtccagcgtgtttatgaggggtcgccacttaatctacctgcgcttgtggtatgatggccacgtgggttctgtggtccccgccatgagctttggatacagcgccttgcactgtgggattttgaacaatattgtggtgctgtgctgcagttactgtgctgatttaagtgagatcagggtgcgctgctgtgcccggaggacaaggcgccttatgctgcgggcggtgcgaatcatcgctgaggagaccactgccatgttgtattcctgcaggacggagcggcggcggcagcagtttattcgcgcgctgctgcagcaccaccgccctatcctgatgcacgattatgactctacccccatgtagaagcttggggatcaattctctagagctcgctgatcagcctcgactgtgccttctagttgccagccatctgttgtttgcccctcccccgtgccttccttgaccctggaaggtgccactcccactgtcctttcctaataaaatgaggaaattgcatcgcattgtctgagtaggtgtcattctattctggggggtggggtggggcaggacagcaagggggaggattgggaagacaatagcaggcatgctggggatgcggtgggctctatggcttctgaggaaattgggcgtggcttaagggtgggaaagaatatataaggtgggggtcttatgtagttttgtatctgttttgcagcagccgccgccgccatgagcaccaactcgtttgatggaagcattgtgagctcatatttgacaacgcgcatgcccccatgggccggggtgcgtcagaatgtgatgggctccagcattgatggtcgccccgtcctgcccgcaaactctactaccttgacctacgagaccgtgtctggaacgccgttggagactgcagcctccgccgccgcttcagccgctgcagccaccgcccgcgggattgtgactgactttgctttcctgagcccgcttgcaagcagtgcagcttcccgttcatccgcccgcgatgacaagttgacggctcttttggcacaattggattctttgacccgggaacttaatgtcgtttctcagcagctgttggatctgcgccagcaggtttctgccctgaaggcttcctcccctcccaatgcggtttaaaacataaataaaaaaccagactctgtttggatttggatcaagcaagtgtcttgctgtctttatttaggggttttgcgcgcgcggtaggcccgggaccagcggtctcggtcgttgagggtcctgtgtattttttccaggacgtggtaaaggtgactctggatgttcagatacatgggcataagcccgtctctggggtggaggtagcaccactgcagagcttcatgctgcggggtggtgttgtagatgatccagtcgtagcaggagcgctgggcgtggtgcctaaaaatgtctttcagtagcaagctgattgccaggggcaggcccttggtgtaagtgtttacaaagcggttaagctgggatgggtgcatacgtggggatatgagatgcatcttggactgtatttttaggttggctatgttcccagccatatccctccggggattcatgttgtgcagaaccaccagcacagtgtatccggtgcacttgggaaatttgtcatgtagcttagaaggaaatgcgtggaagaacttggagacgcccttgtgacctccaagattttccatgcattcgtccataatgatggcaatgggcccacgggcggcggcctgggcgaagatatttctgggatcactaacgtcatagttgtgttccaggatgagatcgtcataggccatttttacaaagcgcgggcggagggtgccagactgcggtataatggttccatccggcccaggggcgtagttaccctcacagatttgcatttcccacgctttgagttcagatggggggatcatgtctacctgcggggcgatgaagaaaacggtttccggggtaggggagatcagctgggaagaaagcaggttcctgagcagctgcgacttaccgcagccggtgggcccgtaaatcacacctattaccgggtgcaactggtagttaagagagctgcagctgccgtcatccctgagcaggggggccacttcgttaagcatgtccctgactcgcatgttttccctgaccaaatccgccagaaggcgctcgccgcccagcgatagcagttcttgcaaggaagcaaagtttttcaacggtttgagaccgtccgccgtaggcatgcttttgagcgtttgaccaagcagttccaggcggtcccacagctcggtcacctgctctacggcatctcgatccagcatatctcctcgtttcgcgggttggggcggctttcgctgtacggcagtagtcggtgctcgtccagacgggccagggtcatgtctttccacgggcgcagggtcctcgtcagcgtagtctgggtcacggtgaaggggtgcgctccgggctgcgcgctggccagggtgcgcttgaggctggtcctgctggtgctgaagcgctgccggtcttcgccctgcgcgtcggccaggtagcatttgaccatggtgtcatagtccagcccctccgcggcgtggcccttggcgcgcagcttgcccttggaggaggcgccgcacgaggggcagtgcagacttttgagggcgtagagcttgggcgcgagaaataccgattccggggagtaggcatccgcgccgcaggccccgcagacggtctcgcattccacgagccaggtgagctctggccgttcggggtcaaaaaccaggtttcccccatgctttttgatgcgtttcttacctctggtttccatgagccggtgtccacgctcggtgacgaaaaggctgtccgtgtccccgtatacagacttgagaggcctgtcctcgagcggtgttccgcggtcctcctcgtatagaaactcggaccactctgagacaaaggctcgcgtccaggccagcacgaaggaggctaagtgggaggggtagcggtcgttgtccactagggggtccactcgctccagggtgtgaagacacatgtcgccctcttcggcatcaaggaaggtgattggtttgtaggtgtaggccacgtgaccgggtgttcctgaaggggggctataaaagggggtgggggcgcgttcgtcctcactctcttccgcatcgctgtctgcgagggccagctgttggggtgagtactccctctgaaaagcgggcatgacttctgcgctaagattgtcagtttccaaaaacgaggaggatttgatattcacctggcccgcggtgatgcctttgagggtggccgcatccatctggtcagaaaagacaatctttttgttgtcaagcttggtggcaaacgacccgtagagggcgttggacagcaacttggcgatggagcgcagggtttggtttttgtcgcgatcggcgcgctccttggccgcgatgtttagctgcacgtattcgcgcgcaacgcaccgccattcgggaaagacggtggtgcgctcgtcgggcaccaggtgcacgcgccaaccgcggttgtgcagggtgacaaggtcaacgctggtggctacctctccgcgtaggcgctcgttggtccagcagaggcggccgcccttgcgcgagcagaatggcggtagggggtctagctgcgtctcgtccggggggtctgcgtccacggtaaagaccccgggcagcaggcgcgcgtcgaagtagtctatcttgcatccttgcaagtctagcgcctgctgccatgcgcgggcggcaagcgcgcgctcgtatgggttgagtgggggaccccatggcatggggtgggtgagcgcggaggcgtacatgccgcaaatgtcgtaaacgtagaggggctctctgagtattccaagatatgtagggtagcatcttccaccgcggatgctggcgcgcacgtaatcgtatagttcgtgcgagggagcgaggaggtcgggaccgaggttgctacgggcgggctgctctgctcggaagactatctgcctgaagatggcatgtgagttggatgatatggttggacgctggaagacgttgaagctggcgtctgtgagacctaccgcgtcacgcacgaaggaggcgtaggagtcgcgcagcttgttgaccagctcggcggtgacctgcacgtctagggcgcagtagtccagggtttccttgatgatgtcatacttatcctgtcccttttttttccacagctcgcggttgaggacaaactcttcgcggtctttccagtactcttggatcggaaacccgtcggcctccgaacggtaagagcctagcatgtagaactggttgacggcctggtaggcgcagcatcccttttctacgggtagcgcgtatgcctgcgcggccttccggagcgaggtgtgggtgagcgcaaaggtgtccctgaccatgactttgaggtactggtatttgaagtcagtgtcgtcgcatccgccctgctcccagagcaaaaagtccgtgcgctttttggaacgcggatttggcagggcgaaggtgacatcgttgaagagtatctttcccgcgcgaggcataaagttgcgtgtgatgcggaagggtcccggcacctcggaacggttgttaattacctgggcggcgagcacgatctcgtcaaagccgttgatgttgtggcccacaatgtaaagttccaagaagcgcgggatgcccttgatggaaggcaattttttaagttcctcgtaggtgagctcttcaggggagctgagcccgtgctctgaaagggcccagtctgcaagatgagggttggaagcgacgaatgagctccacaggtcacgggccattagcatttgcaggtggtcgcgaaaggtcctaaactggcgacctatggccattttttctggggtgatgcagtagaaggtaagcgggtcttgttcccagcggtcccatccaaggttcgcggctaggtctcgcgcggcagtcactagaggctcatctccgccgaacttcatgaccagcatgaagggcacgagctgcttcccaaaggcccccatccaagtataggtctctacatcgtaggtgacaaagagacgctcggtgcgaggatgcgagccgatcgggaagaactggatctcccgccaccaattggaggagtggctattgatgtggtgaaagtagaagtccctgcgacgggccgaacactcgtgctggcttttgtaaaaacgtgcgcagtactggcagcggtgcacgggctgtacatcctgcacgaggttgacctgacgaccgcgcacaaggaagcagagtgggaatttgagcccctcgcctggcgggtttggctggtggtcttctacttcggctgcttgtccttgaccgtctggctgctcgaggggagttacggtggatcggaccaccacgccgcgcgagcccaaagtccagatgtccgcgcgcggcggtcggagcttgatgacaacatcgcgcagatgggagctgtccatggtctggagctcccgcggcgtcaggtcaggcgggagctcctgcaggtttacctcgcatagacgggtcagggcgcgggctagatccaggtgatacctaatttccaggggctggttggtggcggcgtcgatggcttgcaagaggccgcatccccgcggcgcgactacggtaccgcgcggcgggcggtgggccgcgggggtgtccttggatgatgcatctaaaagcggtgacgcgggcgagcccccggaggtagggggggctccggacccgccgggagagggggcaggggcacgtcggcgccgcgcgcgggcaggagctggtgctgcgcgcgtaggttgctggcgaacgcgacgacgcggcggttgatctcctgaatctggcgcctctgcgtgaagacgacgggcccggtgagcttgaacctgaaagagagttcgacagaatcaatttcggtgtcgttgacggcggcctggcgcaaaatctcctgcacgtctcctgagttgtcttgataggcgatctcggccatgaactgctcgatctcttcctcctggagatctccgcgtccggctcgctccacggtggcggcgaggtcgttggaaatgcgggccatgagctgcgagaaggcgttgaggcctccctcgttccagacgcggctgtagaccacgcccccttcggcatcgcgggcgcgcatgaccacctgcgcgagattgagctccacgtgccgggcgaagacggcgtagtttcgcaggcgctgaaagaggtagttgagggtggtggcggtgtgttctgccacgaagaagtacataacccagcgtcgcaacgtggattcgttgatatcccccaaggcctcaaggcgctccatggcctcgtagaagtccacggcgaagttgaaaaactgggagttgcgcgccgacacggttaactcctcctccagaagacggatgagctcggcgacagtgtcgcgcacctcgcgctcaaaggctacaggggcctcttcttcttcttcaatctcctcttccataagggcctccccttcttcttcttctggcggcggtgggggaggggggacacggcggcgacgacggcgcaccgggaggcggtcgacaaagcgctcgatcatctccccgcggcgacggcgcatggtctcggtgacggcgcggccgttctcgcgggggcgcagttggaagacgccgcccgtcatgtcccggttatgggttggcggggggctgccatgcggcagggatacggcgctaacgatgcatctcaacaattgttgtgtaggtactccgccgccgagggacctgagcgagtccgcatcgaccggatcggaaaacctctcgagaaaggcgtctaaccagtcacagtcgcaaggtaggctgagcaccgtggcgggcggcagcgggcggcggtcggggttgtttctggcggaggtgctgctgatgatgtaattaaagtaggcggtcttgagacggcggatggtcgacagaagcaccatgtccttgggtccggcctgctgaatgcgcaggcggtcggccatgccccaggcttcgttttgacatcggcgcaggtctttgtagtagtcttgcatgagcctttctaccggcacttcttcttctccttcctcttgtcctgcatctcttgcatctatcgctgcggcggcggcggagtttggccgtaggtggcgccctcttcctcccatgcgtgtgaccccgaagcccctcatcggctgaagcagggctaggtcggcgacaacgcgctcggctaatatggcctgctgcacctgcgtgagggtagactggaagtcatccatgtccacaaagcggtggtatgcgcccgtgttgatggtgtaagtgcagttggccataacggaccagttaacggtctggtgacccggctgcgagagctcggtgtacctgagacgcgagtaagccctcgagtcaaatacgtagtcgttgcaagtccgcaccaggtactggtatcccaccaaaaagtgcggcggcggctggcggtagaggggccagcgtagggtggccggggctccgggggcgagatcttccaacataaggcgatgatatccgtagatgtacctggacatccaggtgatgccggcggcggtggtggaggcgcgcggaaagtcgcggacgcggttccagatgttgcgcagcggcaaaaagtgctccatggtcgggacgctctggccggtcaggcgcgcgcaatcgttgacgctctagcgtgcaaaaggagagcctgtaagcgggcactcttccgtggtctggtggataaattcgcaagggtatcatggcggacgaccggggttcgagccccgtatccggccgtccgccgtgatccatgcggttaccgcccgcgtgtcgaacccaggtgtgcgacgtcagacaacgggggagtgctccttttggcttccttccaggcgcggcggctgctgcgctagcttttttggccactggccgcgcgcagcgtaagcggttaggctggaaagcgaaagcattaagtggctcgctccctgtagccggagggttattttccaagggttgagtcgcgggacccccggttcgagtctcggaccggccggactgcggcgaacgggggtttgcctccccgtcatgcaagaccccgcttgcaaattcctccggaaacagggacgagccccttttttgcttttcccagatgcatccggtgctgcggcagatgcgcccccctcctcagcagcggcaagagcaagagcagcggcagacatgcagggcaccctcccctcctcctaccgcgtcaggaggggcgacatccgcggttgacgcggcagcagatggtgattacgaacccccgcggcgccgggcccggcactacctggacttggaggagggcgagggcctggcgcggctaggagcgccctctcctgagcggcacccaagggtgcagctgaagcgtgatacgcgtgaggcgtacgtgccgcggcagaacctgtttcgcgaccgcgagggagaggagcccgaggagatgcgggatcgaaagttccacgcagggcgcgagctgcggcatggcctgaatcgcgagcggttgctgcgcgaggaggactttgagcccgacgcgcgaaccgggattagtcccgcgcgcgcacacgtggcggccgccgacctggtaaccgcatacgagcagacggtgaaccaggagattaactttcaaaaaagctttaacaaccacgtgcgtacgcttgtggcgcgcgaggaggtggctataggactgatgcatctgtgggactttgtaagcgcgctggagcaaaacccaaatagcaagccgctcatggcgcagctgttccttatagtgcagcacagcagggacaacgaggcattcagggatgcgctgctaaacatagtagagcccgagggccgctggctgctcgatttgataaacatcctgcagagcatagtggtgcaggagcgcagcttgagcctggctgacaaggtggccgccatcaactattccatgcttagcctgggcaagttttacgcccgcaagatataccataccccttacgttcccatagacaaggaggtaaagatcgaggggttctacatgcgcatggcgctgaaggtgcttaccttgagcgacgacctgggcgtttatcgcaacgagcgcatccacaaggccgtgagcgtgagccggcggcgcgagctcagcgaccgcgagctgatgcacagcctgcaaagggccctggctggcacgggcagcggcgatagagaggccgagtcctactttgacgcgggcgctgacctgcgctgggccccaagccgacgcgccctggaggcagctggggccggacctgggctggcggtggcacccgcgcgcgctggcaacgtcggcggcgtggaggaatatgacgaggacgatgagtacgagccagaggacggcgagtactaagcggtgatgtttctgatcagatgatgcaagacgcaacggacccggcggtgcgggcggcgctgcagagccagccgtccggccttaactccacggacgactggcgccaggtcatggaccgcatcatgtcgctgactgcgcgcaatcctgacgcgttccggcagcagccgcaggccaaccggctctccgcaattctggaagcggtggtcccggcgcgcgcaaaccccacgcacgagaaggtgctggcgatcgtaaacgcgctggccgaaaacagggccatccggcccgacgaggccggcctggtctacgacgcgctgcttcagcgcgtggctcgttacaacagcggcaacgtgcagaccaacctggaccggctggtgggggatgtgcgcgaggccgtggcgcagcgtgagcgcgcgcagcagcagggcaacctgggctccatggttgcactaaacgccttcctgagtacacagcccgccaacgtgccgcggggacaggaggactacaccaactttgtgagcgcactgcggctaatggtgactgagacaccgcaaagtgaggtgtaccagtctgggccagactattttttccagaccagtagacaaggcctgcagaccgtaaacctgagccaggctttcaaaaacttgcaggggctgtggggggtgcgggctcccacaggcgaccgcgcgaccgtgtctagcttgctgacgcccaactcgcgcctgttgctgctgctaatagcgcccttcacggacagtggcagcgtgtcccgggacacatacctaggtcacttgctgacactgtaccgcgaggccataggtcaggcgcatgtggacgagcatactttccaggagattacaagtgtcagccgcgcgctggggcaggaggacacgggcagcctggaggcaaccctaaactacctgctgaccaaccggcggcagaagatcccctcgttgcacagtttaaacagcgaggaggagcgcattttgcgctacgtgcagcagagcgtgagccttaacctgatgcgcgacggggtaacgcccagcgtggcgctggacatgaccgcgcgcaacatggaaccgggcatgtatgcctcaaaccggccgtttatcaaccgcctaatggactacttgcatcgcgcggccgccgtgaaccccgagtatttcaccaatgccatcttgaacccgcactggctaccgccccctggtttctacaccgggggattcgaggtgcccgagggtaacgatggattcctctgggacgacatagacgacagcgtgttttccccgcaaccgcagaccctgctagagttgcaacagcgcgagcaggcagaggcggcgctgcgaaaggaaagcttccgcaggccaagcagcttgtccgatctaggcgctgcggccccgcggtcagatgctagtagcccatttccaagcttgatagggtctcttaccagcactcgcaccacccgcccgcgcctgctgggcgaggaggagtacctaaacaactcgctgctgcagccgcagcgcgaaaaaaacctgcctccggcatttcccaacaacgggatagagagcctagtggacaagatgagtagatggaagacgtacgcgcaggagcacagggacgtgccaggcccgcgcccgcccacccgtcgtcaaaggcacgaccgtcagcggggtctggtgtgggaggacgatgactcggcagacgacagcagcgtcctggatttgggagggagtggcaacccgtttgcgcaccttcgccccaggctggggagaatgttttaaaaaaaaaaaagcatgatgcaaaataaaaaactcaccaaggccatggcaccgagcgttggttttcttgtattccccttagtatgcggcgcgcggcgatgtatgaggaaggtcctcctccctcctacgagagtgtggtgagcgcggcgccagtggcggcggcgctgggttctcccttcgatgctcccctggacccgccgtttgtgcctccgcggtacctgcggcctaccggggggagaaacagcatccgttactctgagttggcacccctattcgacaccacccgtgtgtacctggtggacaacaagtcaacggatgtggcatccctgaactaccagaacgaccacagcaactttctgaccacggtcattcaaaacaatgactacagcccgggggaggcaagcacacagaccatcaatcttgacgaccggtcgcactggggcggcgacctgaaaaccatcctgcataccaacatgccaaatgtgaacgagttcatgtttaccaataagtttaaggcgcgggtgatggtgtcgcgcttgcctactaaggacaatcaggtggagctgaaatacgagtgggtggagttcacgctgcccgagggcaactactccgagaccatgaccatagaccttatgaacaacgcgatcgtggagcactacttgaaagtgggcagacagaacggggttctggaaagcgacatcggggtaaagtttgacacccgcaacttcagactggggtttgaccccgtcactggtcttgtcatgcctggggtatatacaaacgaagccttccatccagacatcattttgctgccaggatgcggggtggacttcacccacagccgcctgagcaacttgttgggcatccgcaagcggcaacccttccaggagggctttaggatcacctacgatgatctggagggtggtaacattcccgcactgttggatgtggacgcctaccaggcgagcttgaaagatgacaccgaacagggcgggggtggcgcaggcggcagcaacagcagtggcagcggcgcggaagagaactccaacgcggcagccgcggcaatgcagccggtggaggacatgaacgatcatgccattcgcggcgacacctttgccacacgggctgaggagaagcgcgctgaggccgaagcagcggccgaagctgccgcccccgctgcgcaacccgaggtcgagaagcctcagaagaaaccggtgatcaaacccctgacagaggacagcaagaaacgcagttacaacctaataagcaatgacagcaccttcacccagtaccgcagctggtaccttgcatacaactacggcgaccctcagaccggaatccgctcatggaccctgctttgcactcctgacgtaacctgcggctcggagcaggtctactggtcgttgccagacatgatgcaagaccccgtgaccttccgctccacgcgccagatcagcaactttccggtggtgggcgccgagctgttgcccgtgcactccaagagcttctacaacgaccaggccgtctactcccaactcatccgccagtttacctctctgacccacgtgttcaatcgctttcccgagaaccagattttggcgcgcccgccagcccccaccatcaccaccgtcagtgaaaacgttcctgctctcacagatcacgggacgctaccgctgcgcaacagcatcggaggagtccagcgagtgaccattactgacgccagacgccgcacctgcccctacgtttacaaggccctgggcatagtctcgccgcgcgtcctatcgagccgcactttttgagcaagcatgtccatccttatatcgcccagcaataacacaggctggggcctgcgcttcccaagcaagatgtttggcggggccaagaagcgctccgaccaacacccagtgcgcgtgcgcgggcactaccgcgcgccctggggcgcgcacaaacgcggccgcactgggcgcaccaccgtcgatgacgccatcgacgcggtggtggaggaggcgcgcaactacacgcccacgccgccaccagtgtccacagtggacgcggccattcagaccgtggtgcgcggagcccggcgctatgctaaaatgaagagacggcggaggcgcgtagcacgtcgccaccgccgccgacccggcactgccgcccaacgcgcggcggcggccctgcttaaccgcgcacgtcgcaccggccgacgggcggccatgcgggccgctcgaaggctggccgcgggtattgtcactgtgccccccaggtccaggcgacgagcggccgccgcagcagccgcggccattagtgctatgactcagggtcgcaggggcaacgtgtattgggtgcgcgactcggttagcggcctgcgcgtgcccgtgcgcacccgccccccgcgcaactagattgcaagaaaaaactacttagactcgtactgttgtatgtatccagcggcggcggcgcgcaacgaagctatgtccaagcgcaaaatcaaagaagagatgctccaggtcatcgcgccggagatctatggccccccgaagaaggaagagcaggattacaagccccgaaagctaaagcgggtcaaaaagaaaaagaaagatgatgatgatgaacttgacgacgaggtggaactgctgcacgctaccgcgcccaggcgacgggtacagtggaaaggtcgacgcgtaaaacgtgttttgcgacccggcaccaccgtagtctttacgcccggtgagcgctccacccgcacctacaagcgcgtgtatgatgaggtgtacggcgacgaggacctgcttgagcaggccaacgagcgcctcggggagtttgcctacggaaagcggcataaggacatgctggcgttgccgctggacgagggcaacccaacacctagcctaaagcccgtaacactgcagcaggtgctgcccgcgcttgcaccgtccgaagaaaagcgcggcctaaagcgcgagtctggtgacttggcacccaccgtgcagctgatggtacccaagcgccagcgactggaagatgtcttggaaaaaatgaccgtggaacctgggctggagcccgaggtccgcgtgcggccaatcaagcaggtggcgccgggactgggcgtgcagaccgtggacgttcagatacccactaccagtagcaccagtattgccaccgccacagagggcatggagacacaaacgtccccggttgcctcagcggtggcggatgccgcggtgcaggcggtcgctgcggccgcgtccaagacctctacggaggtgcaaacggacccgtggatgtttcgcgtttcagccccccggcgcccgcgccgttcgaggaagtacggcgccgccagcgcgctactgcccgaatatgccctacatccttccattgcgcctacccccggctatcgtggctacacctaccgccccagaagacgagcaactacccgacgccgaaccaccactggaacccgccgccgccgtcgccgtcgccagcccgtgctggccccgatttccgtgcgcagggtggctcgcgaaggaggcaggaccctggtgctgccaacagcgcgctaccaccccagcatcgtttaaaagccggtctttgtggttcttgcagatatggccctcacctgccgcctccgtttcccggtgccgggattccgaggaagaatgcaccgtaggaggggcatggccggccacggcctgacgggcggcatgcgtcgtgcgcaccaccggcggcggcgcgcgtcgcaccgtcgcatgcgcggcggtatcctgcccctccttattccactgatcgccgcggcgattggcgccgtgcccggaattgcatccgtggccttgcaggcgcagagacactgattaaaaacaagttgcatgtggaaaaatcaaaataaaaagtctggactctcacgctcgcttggtcctgtaactattttgtagaatggaagacatcaactttgcgtctctggccccgcgacacggctcgcgcccgttcatgggaaactggcaagatatcggcaccagcaatatgagcggtggcgccttcagctggggctcgctgtggagcggcattaaaaatttcggttccaccgttaagaactatggcagcaaggcctggaacagcagcacaggccagatgctgagggataagttgaaagagcaaaatttccaacaaaaggtggtagatggcctggcctctggcattagcggggtggtggacctggccaaccaggcagtgcaaaataagattaacagtaagcttgatccccgccctcccgtagaggagcctccaccggccgtggagacagtgtctccagaggggcgtggcgaaaagcgtccgcgccccgacagggaagaaactctggtgacgcaaatagacgagcctccctcgtacgaggaggcactaaagcaaggcctgcccaccacccgtcccatcgcgcccatggctaccggagtgctgggccagcacacacccgtaacgctggacctgcctccccccgccgacacccagcagaaacctgtgctgccaggcccgaccgccgttgttgtaacccgtcctagccgcgcgtccctgcgccgcgccgccagcggtccgcgatcgttgcggcccgtagccagtggcaactggcaaagcacactgaacagcatcgtgggtctgggggtgcaatccctgaagcgccgacgatgcttctgatagctaacgtgtcgtatgtgtgtcatgtatgcgtccatgtcgccgccagaggagctgctgagccgccgcgcgcccgctttccaagatggctaccccttcgatgatgccgcagtggtcttacatgcacatctcgggccaggacgcctcggagtacctgagccccgggctggtgcagtttgcccgcgccaccgagacgtacttcagcctgaataacaagtttagaaaccccacggtggcgcctacgcacgacgtgaccacagaccggtcccagcgtttgacgctgcggttcatccctgtggaccgtgaggatactgcgtactcgtacaaggcgcggttcaccctagctgtgggtgataaccgtgtgctggacatggcttccacgtactttgacatccgcggcgtgctggacaggggccctacttttaagccctactctggcactgcctacaacgccctggctcccaagggtgccccaaatccttgcgaatgggatgaagctgctactgctcttgaaataaacctagaagaagaggacgatgacaacgaagacgaagtagacgagcaagctgagcagcaaaaaactcacgtatttgggcaggcgccttattctggtataaatattacaaaggagggtattcaaataggtgtcgaaggtcaaacacctaaatatgccgataaaacatttcaacctgaacctcaaataggagaatctcagtggtacgaaacagaaattaatcatgcagctgggagagtcctaaaaaagactaccccaatgaaaccatgttacggttcatatgcaaaacccacaaatgaaaatggagggcaaggcattcttgtaaagcaacaaaatggaaagctagaaagtcaagtggaaatgcaatttttctcaactactgaggcagccgcaggcaatggtgataacttgactcctaaagtggtattgtacagtgaagatgtagatatagaaaccccagacactcatatttcttacatgcccactattaaggaaggtaactcacgagaactaatgggccaacaatctatgcccaacaggcctaattacattgcttttagggacaattttattggtctaatgtattacaacagcacgggtaatatgggtgttctggcgggccaagcatcgcagttgaatgctgttgtagatttgcaagacagaaacacagagctttcataccagcttttgcttgattccattggtgatagaaccaggtacttttctatgtggaatcaggctgttgacagctatgatccagatgttagaattattgaaaatcatggaactgaagatgaacttccaaattactgctttccactgggaggtgtgattaatacagagactcttaccaaggtaaaacctaaaacaggtcaggaaaatggatgggaaaaagatgctacagaattttcagataaaaatgaaataagagttggaaataattttgccatggaaatcaatctaaatgccaacctgtggagaaatttcctgtactccaacatagcgctgtatttgcccgacaagctaaagtacagtccttccaacgtaaaaatttctgataacccaaacacctacgactacatgaacaagcgagtggtggctcccgggctagtggactgctacattaaccttggagcacgctggtcccttgactatatggacaacgtcaacccatttaaccaccaccgcaatgctggcctgcgctaccgctcaatgttgctgggcaatggtcgctatgtgcccttccacatccaggtgcctcagaagttctttgccattaaaaacctccttctcctgccgggctcatacacctacgagtggaacttcaggaaggatgttaacatggttctgcagagctccctaggaaatgacctaagggttgacggagccagcattaagtttgatagcatttgcctttacgccaccttcttccccatggcccacaacaccgcctccacgcttgaggccatgcttagaaacgacaccaacgaccagtcctttaacgactatctctccgccgccaacatgctctaccctatacccgccaacgctaccaacgtgcccatatccatcccctcccgcaactgggcggctttccgcggctgggccttcacgcgccttaagactaaggaaaccccatcactgggctcgggctacgacccttattacacctactctggctctataccctacctagatggaaccttttacctcaaccacacctttaagaaggtggccattacctttgactcttctgtcagctggcctggcaatgaccgcctgcttacccccaacgagtttgaaattaagcgctcagttgacggggagggttacaacgttgcccagtgtaacatgaccaaagactggttcctggtacaaatgctagctaactataacattggctaccagggcttctatatcccagagagctacaaggaccgcatgtactccttctttagaaacttccagcccatgagccgtcaggtggtggatgatactaaatacaaggactaccaacaggtgggcatcctacaccaacacaacaactctggatttgttggctaccttgcccccaccatgcgcgaaggacaggcctaccctgctaacttcccctatccgcttataggcaagaccgcagttgacagcattacccagaaaaagtttctttgcgatcgcaccctttggcgcatcccattctccagtaactttatgtccatgggcgcactcacagacctgggccaaaaccttctctacgccaactccgcccacgcgctagacatgacttttgaggtggatcccatggacgagcccacccttctttatgttttgtttgaagtctttgacgtggtccgtgtgcaccagccgcaccgcggcgtcatcgaaaccgtgtacctgcgcacgcccttctcggccggcaacgccacaacataaagaagcaagcaacatcaacaacagctgccgccatgggctccagtgagcaggaactgaaagccattgtcaaagatcttggttgtgggccatattttttgggcacctatgacaagcgctttccaggctttgtttctccacacaagctcgcctgcgccatagtcaatacggccggtcgcgagactgggggcgtacactggatggcctttgcctggaacccgcactcaaaaacatgctacctctttgagccctttggcttttctgaccagcgactcaagcaggtttaccagtttgagtacgagtcactcctgcgccgtagcgccattgcttcttcccccgaccgctgtataacgctggaaaagtccacccaaagcgtacaggggcccaactcggccgcctgtggactattctgctgcatgtttctccacgcctttgccaactggccccaaactcccatggatcacaaccccaccatgaaccttattaccggggtacccaactccatgctcaacagtccccaggtacagcccaccctgcgtcgcaaccaggaacagctctacagcttcctggagcgccactcgccctacttccgcagccacagtgcgcagattaggagcgccacttctttttgtcacttgaaaaacatgtaaaaataatgtactagagacactttcaataaaggcaaatgcttttatttgtacactctcgggtgattatttacccccacccttgccgtctgcgccgtttaaaaatcaaaggggttctgccgcgcatcgctatgcgccactggcagggacacgttgcgatactggtgtttagtgctccacttaaactcaggcacaaccatccgcggcagctcggtgaagttttcactccacaggctgcgcaccatcaccaacgcgtttagcaggtcgggcgccgatatcttgaagtcgcagttggggcctccgccctgcgcgcgcgagttgcgatacacagggttgcagcactggaacactatcagcgccgggtggtgcacgctggccagcacgctcttgtcggagatcagatccgcgtccaggtcctccgcgttgctcagggcgaacggagtcaactttggtagctgccttcccaaaaagggcgcgtgcccaggctttgagttgcactcgcaccgtagtggcatcaaaaggtgaccgtgcccggtctgggcgttaggatacagcgcctgcataaaagccttgatctgcttaaaagccacctgagcctttgcgccttcagagaagaacatgccgcaagacttgccggaaaactgattggccggacaggccgcgtcgtgcacgcagcaccttgcgtcggtgttggagatctgcaccacatttcggccccaccggttcttcacgatcttggccttgctagactgctccttcagcgcgcgctgcccgttttcgctcgtcacatccatttcaatcacgtgctccttatttatcataatgcttccgtgtagacacttaagctcgccttcgatctcagcgcagcggtgcagccacaacgcgcagcccgtgggctcgtgatgcttgtaggtcacctctgcaaacgactgcaggtacgcctgcaggaatcgccccatcatcgtcacaaaggtcttgttgctggtgaaggtcagctgcaacccgcggtgctcctcgttcagccaggtcttgcatacggccgccagagcttccacttggtcaggcagtagtttgaagttcgcctttagatcgttatccacgtggtacttgtccatcagcgcgcgcgcagcctccatgcccttctcccacgcagacacgatcggcacactcagcgggttcatcaccgtaatttcactttccgcttcgctgggctcttcctcttcctcttgcgtccgcataccacgcgccactgggtcgtcttcattcagccgccgcactgtgcgcttacctcctttgccatgcttgattagcaccggtgggttgctgaaacccaccatttgtagcgccacatcttctctttcttcctcgctgtccacgattacctctggtgatggcgggcgctcgggcttgggagaagggcgcttctttttcttcttgggcgcaatggccaaatccgccgccgaggtcgatggccgcgggctgggtgtgcgcggcaccagcgcgtcttgtgatgagtcttcctcgtcctcggactcgatacgccgcctcatccgcttttttgggggcgcccggggaggcggcggcgacggggacggggacgacacgtcctccatggttgggggacgtcgcgccgcaccgcgtccgcgctcgggggtggtttcgcgctgctcctcttcccgactggccatttccttctcctataggcagaaaaagatcatggagtcagtcgagaagaaggacagcctaaccgccccctctgagttcgccaccaccgcctccaccgatgccgccaacgcgcctaccaccttccccgtcgaggcacccccgcttgaggaggaggaagtgattatcgagcaggacccaggttttgtaagcgaagacgacgaggaccgctcagtaccaacagaggataaaaagcaagaccaggacaacgcagaggcaaacgaggaacaagtcgggcggggggacgaaaggcatggcgactacctagatgtgggagacgacgtgctgttgaagcatctgcagcgccagtgcgccattatctgcgacgcgttgcaagagcgcagcgatgtgcccctcgccatagcggatgtcagccttgcctacgaacgccacctattctcaccgcgcgtaccccccaaacgccaagaaaacggcacatgcgagcccaacccgcgcctcaacttctaccccgtatttgccgtgccagaggtgcttgccacctatcacatctttttccaaaactgcaagatacccctatcctgccgtgccaaccgcagccgagcggacaagcagctggccttgcggcagggcgctgtcatacctgatatcgcctcgctcaacgaagtgccaaaaatctttgagggtcttggacgcgacgagaagcgcgcggcaaacgctctgcaacaggaaaacagcgaaaatgaaagtcactctggagtgttggtggaactcgagggtgacaacgcgcgcctagccgtactaaaacgcagcatcgaggtcacccactttgcctacccggcacttaacctaccccccaaggtcatgagcacagtcatgagtgagctgatcgtgcgccgtgcgcagcccctggagagggatgcaaatttgcaagaacaaacagaggagggcctacccgcagttggcgacgagcagctagcgcgctggcttcaaacgcgcgagcctgccgacttggaggagcgacgcaaactaatgatggccgcagtgctcgttaccgtggagcttgagtgcatgcagcggttctttgctgacccggagatgcagcgcaagctagaggaaacattgcactacacctttcgacagggctacgtacgccaggcctgcaagatctccaacgtggagctctgcaacctggtctcctaccttggaattttgcacgaaaaccgccttgggcaaaacgtgcttcattccacgctcaagggcgaggcgcgccgcgactacgtccgcgactgcgtttacttatttctatgctacacctggcagacggccatgggcgtttggcagcagtgcttggaggagtgcaacctcaaggagctgcagaaactgctaaagcaaaacttgaaggacctatggacggccttcaacgagcgctccgtggccgcgcacctggcggacatcattttccccgaacgcctgcttaaaaccctgcaacagggtctgccagacttcaccagtcaaagcatgttgcagaactttaggaactttatcctagagcgctcaggaatcttgcccgccacctgctgtgcacttcctagcgactttgtgcccattaagtaccgcgaatgccctccgccgctttggggccactgctaccttctgcagctagccaactaccttgcctaccactctgacataatggaagacgtgagcggtgacggtctactggagtgtcactgtcgctgcaacctatgcaccccgcaccgctccctggtttgcaattcgcagctgcttaacgaaagtcaaattatcggtacctttgagctgcagggtccctcgcctgacgaaaagtccgcggctccggggttgaaactcactccggggctgtggacgtcggcttaccttcgcaaatttgtacctgaggactaccacgcccacgagattaggttctacgaagaccaatcccgcccgcctaatgcggagcttaccgcctgcgtcattacccagggccacattcttggccaattgcaagccatcaacaaagcccgccaagagtttctgctacgaaagggacggggggtttacttggacccccagtccggcgaggagctcaacccaatccccccgccgccgcagccctatcagcagcagccgcgggcccttgcttcccaggatggcacccaaaaagaagctgcagctgccgccgccacccacggacgaggaggaatactgggacagtcaggcagaggaggttttggacgaggaggaggaggacatgatggaagactgggagagcctagacgaggaagcttccgaggtcgaagaggtgtcagacgaaacaccgtcaccctcggtcgcattcccctcgccggcgccccagaaatcggcaaccggttccagcatggctacaacctccgctcctcaggcgccgccggcactgcccgttcgccgacccaaccgtagatgggacaccactggaaccagggccggtaagtccaagcagccgccgccgttagcccaagagcaacaacagcgccaaggctaccgctcatggcgcgggcacaagaacgccatagttgcttgcttgcaagactgtgggggcaacatctccttcgcccgccgctttcttctctaccatcacggcgtggccttcccccgtaacatcctgcattactaccgtcatctctacagcccatactgcaccggcggcagcggcagcaacagcagcggccacacagaagcaaaggcgaccggatagcaagactctgacaaagcccaagaaatccacagcggcggcagcagcaggaggaggagcgctgcgtctggcgcccaacgaacccgtatcgacccgcgagcttagaaacaggatttttcccactctgtatgctatatttcaacagagcaggggccaagaacaagagctgaaaataaaaaacaggtctctgcgatccctcacccgcagctgcctgtatcacaaaagcgaagatcagcttcggcgcacgctggaagacgcggaggctctcttcagtaaatactgcgcgctgactcttaaggactagtttcgcgccctttctcaaatttaagcgcgaaaactacgtcatctccagcggccacacccggcgccagcacctgttgtcagcgccattatgagcaaggaaattcccacgccctacatgtggagttaccagccacaaatgggacttgcggctggagctgcccaagactactcaacccgaataaactacatgagcgcgggaccccacatgatatcccgggtcaacggaatacgcgcccaccgaaaccgaattctcctggaacaggcggctattaccaccacacctcgtaataaccttaatccccgtagttggcccgctgccctggtgtaccaggaaagtcccgctcccaccactgtggtacttcccagagacgcccaggccgaagttcagatgactaactcaggggcgcagcttgcgggcggctttcgtcacagggtgcggtcgcccgggcagggtataactcacctgacaatcagagggcgaggtattcagctcaacgacgagtcggtgagctcctcgcttggtctccgtccggacgggacatttcagatcggcggcgccggccgctcttcattcacgcctcgtcaggcaatcctaactctgcagacctcgtcctctgagccgcgctctggaggcattggaactctgcaatttattgaggagtttgtgccatcggtctactttaaccccttctcgggacctcccggccactatccggatcaatttattcctaactttgacgcggtaaaggactcggcggacggctacgactgaatgttaagtggagaggcagagcaactgcgcctgaaacacctggtccactgtcgccgccacaagtgctttgcccgcgactccggtgagttttgctactttgaattgcccgaggatcatatcgagggcccggcgcacggcgtccggcttaccgcccagggagagcttgcccgtagcctgattcgggagtttacccagcgccccctgctagttgagcgggacaggggaccctgtgttctcactgtgatttgcaactgtcctaaccctggattacatcaagatcctctagttaatgtcaggtcgcctaagtcgattaactagagtacccggggatcttattccctttaactaataaaaaaaaataataaagcatcacttacttaaaatcagttagcaaatttctgtccagtttattcagcagcacctccttgccctcctcccagctctggtattgcagcttcctcctggctgcaaactttctccacaatctaaatggaatgtcagtttcctcctgttcctgtccatccgcacccactatcttcatgttgttgcagatgaagcgcgcaagaccgtctgaagataccttcaaccccgtgtatccatatgacacggaaaccggtcctccaactgtgccttttcttactcctccctttgtatcccccaatgggtttcaagagagtccccctggggtactctctttgcgcctatccgaacctctagttacctccaatggcatgcttgcgctcaaaatgggcaacggcctctctctggacgaggccggcaaccttacctcccaaaatgtaaccactgtgagcccacctctcaaaaaaaccaagtcaaacataaacctggaaatatctgcacccctcacagttacctcagaagccctaactgtggctgccgccgcacctctaatggtcgcgggcaacacactcaccatgcaatcacaggccccgctaaccgtgcacgactccaaacttagcattgccacccaaggacccctcacagtgtcagaaggaaagctagccctgcaaacatcaggccccctcaccaccaccgatagcagtacccttactatcactgcctcaccccctctaactactgccactggtagcttgggcattgacttgaaagagcccatttatacacaaaatggaaaactaggactaaagtacggggctcctttgcatgtaacagacgacctaaacactttgaccgtagcaactggtccaggtgtgactattaataatacttccttgcaaactaaagttactggagccttgggttttgattcacaaggcaatatgcaacttaatgtagcaggaggactaaggattgattctcaaaacagacgccttatacttgatgttagttatccgtttgatgctcaaaaccaactaaatctaagactaggacagggccctctttttataaactcagcccacaacttggatattaactacaacaaaggcctttacttgtttacagcttcaaacaattccaaaaagcttgaggttaacctaagcactgccaaggggttgatgtttgacgctacagccatagccattaatgcaggagatgggcttgaatttggttcacctaatgcaccaaacacaaatcccctcaaaacaaaaattggccatggcctagaatttgattcaaacaaggctatggttcctaaactaggaactggccttagttttgacagcacaggtgccattacagtaggaaacaaaaataatgataagctaactttgtggaccggaataaaccctccacctaactgtcaaattgtggaaaacactaatacaaatgatggcaaacttactttagtattagtaaaaaatggagggcttgttaatggctacgtgtctctagttggtgtatcagacactgtgaaccaaatgttcacacaaaagacagcaaacatccaattaagattatattttgactcttctggaaatctattaactgaggaatcagacttaaaaattccacttaaaaataaatcttctacagcgaccagtgaaactgtagccagcagcaaagcctttatgccaagtactacagcttatcccttcaacaccactactagggatagtgaaaactacattcatggaatatgttactacatgactagttatgatagaagtctatttcccttgaacatttctataatgctaaacagccgtatgatttcttccaatgttgcctatgccatacaatttgaatggaatctaaatgcaagtgaatctccagaaagcaacatagctacgctgaccacatccccctttttcttttcttacattacagaagacgacaactaaagaatcgtttgtgttatgtttcaacgtgtttatttttcaattgcagaaaatttcaagtcatttttcattcagtagtatagccccaccaccacatagcttatacagatcaccgtaccttaatcaaactcacagaaccctagtattcaacctgccacctccctcccaacacacagagtacacagtcctttctccccggctggccttaaaaagcatcatatcatgggtaacagacatattcttaggtgttatattccacacggtttcctgtcgagccaaacgctcatcagtgatattaataaactccccgggcagctcacttaagttcatgtcgctgtccagctgctgagccacaggctgctgtccaacttgcggttgcttaacgggcggcgaaggagaagtccacgcctacatgggggtagagtcataatcgtgcatcaggatagggcggtggtgctgcagcagcgcgcgaataaactgctgccgccgccgctccgtcctgcaggaatacaacatggcagtggtctcctcagcgatgattcgcaccgcccgcagcataaggcgccttgtcctccgggcacagcagcgcaccctgatctcacttaaatcagcacagtaactgcagcacagcaccacaatattgttcaaaatcccacagtgcaaggcgctgtatccaaagctcatggcggggaccacagaacccacgtggccatcataccacaagcgcaggtagattaagtggcgacccctcataaacacgctggacataaacattacctcttttggcatgttgtaattcaccacctcccctctgattaaacatggcgccatccaccaccatcctaaaccagctggccaaaacctgcccgccggctatacactgcagggaaccgggactggaacaatgacagtggagagcccaggactcgtaaccatggatcatcatgctcgtcatgatatcaatgttggcacaacacaggcacacgtgcatacacttcctcaggattacaagctcctcccgcgttagaaccatatcccagggaacaacccattcctgaatcagcgtaaatcccacactgcagggaagacctcgcacgtaactcacgttgtgcattgtcaaagtgttacattcgggcagcagcggatgatcctccagtatggtagcgcgggtttctgtctcaaaaggaggtagacgatccctactgtacggagtgcgccgagacaaccgagatcgtgttggtcgtagtgtcatgccaaatggaacgccggacgtagtcatatttcctgaagcaaaaccaggtgcgggcgtgacaaacagatctgcgtctccggtctcgccgcttagatcgctctgtgtagtagttgtagtatatccactctctcaaagcatccaggcgccccctggcttcgggttctatgtaaactccttcatgcgccgctgccctgataacatccaccaccgcagaataagccacacccagccaacctacacattcgttctgcgagtcacacacgggaggagcgggaagagctggaagaaccatgtttttttttttattccaaaagattatccaaaacctcaaaatgaagatctattaagtgaacgcgctcccctccggtggcgtggtcaaactctacagccaaagaacagataatggcatttgtaagatgttgcacaatggcttccaaaaggcaaacggccctcacgtccaagtggacgtaaaggctaaacccttcagggtgaatctcctctataaacattccagcaccttcaaccatgcccaaataattctcatctcgccaccttctcaatatatctctaagcaaatcccgaatattaagtccggccattgtaaaaatctgctccagagcgccctccaccttcagcctcaagcagcgaatcatgattgcaaaaattcaggttcctcacagacctgtataagattcaaaagcggaacattaacaaaaataccgcgatcccgtaggtcccttcgcagggccagctgaacataatcgtgcaggtctgcacggaccagcgcggccacttccccgccaggaaccatgacaaaagaacccacactgattatgacacgcatactcggagctatgctaaccagcgtagccccgatgtaagcttgttgcatgggcggcgatataaaatgcaaggtgctgctcaaaaaatcaggcaaagcctcgcgcaaaaaagaaagcacatcgtagtcatgctcatgcagataaaggcaggtaagctccggaaccaccacagaaaaagacaccatttttctctcaaacatgtctgcgggtttctgcataaacacaaaataaaataacaaaaaaacatttaaacattagaagcctgtcttacaacaggaaaaacaacccttataagcataagacggactacggccatgccggcgtgaccgtaaaaaaactggtcaccgtgattaaaaagcaccaccgacagctcctcggtcatgtccggagtcataatgtaagactcggtaaacacatcaggttgattcacatcggtcagtgctaaaaagcgaccgaaatagcccgggggaatacatacccgcaggcgtagagacaacattacagcccccataggaggtataacaaaattaataggagagaaaaacacataaacacctgaaaaaccctcctgcctaggcaaaatagcaccctcccgctccagaacaacatacagcgcttccacagcggcagccataacagtcagccttaccagtaaaaaagaaaacctattaaaaaaacaccactcgacacggcaccagctcaatcagtcacagtgtaaaaaagggccaagtgcagagcgagtatatataggactaaaaaatgacgtaacggttaaagtccacaaaaaacacccagaaaaccgcacgcgaacctacgcccagaaacgaaagccaaaaaacccacaacttcctcaaatcgtcacttccgttttcccacgttacgtcacttcccattttaagaaaactacaattcccaacacatacaagttactccgccctaaaacctacgtcacccgccccgttcccacgccccgcgccacgtcacaaactccaccccctcattatcatattggcttcaatccaaaataaggtatattattgatgatg

SEQ ID NO: 26 - DNA, 36431 bp, Artificial Sequence
  pAdk35RF-Spike/E4orf6(-0.25kb)-E4dl355(E4re#21)
ttaattaacatcatcaataatataccttattttggattgaagccaatatgataatgagggggtggagtttgtgacgtggcgcggggcgtgggaacggggcgggtgacgtagtagtgtggcggaagtgtgatgttgcaagtgtggcggaacacatgtaagcgacggatgtggcaaaagtgacgtttttggtgtgcgccggtgtacacaggaagtgacaattttcgcgcggttttaggcggatgttgtagtaaatttgggcgtaaccgagtaagatttggccattttcgcgggaaaactgaataagaggaagtgaaatctgaataattttgtgttactcatagcgcgtaataatttgatccgcgttaagatacattgatgagtttggacaaaccacaactagaatgcagtgaaaaaaatgctttatttgtgaaatttgtgatgctattgctttatttgtaaccattataagctgcaataaacaagttaacaacaacaattgcattcattttatgtttcaggttcagggggaggtgtgggaggttttttaaagcaagtaaaacctctacaaatgtggtatggctgattatgatcaattttcatggccacttgatgtattgttcatatttgcccagttcttggaggtcaatcagggactcattcaggttcttagccacctcattcagtctgtcaatctccttctggatgttcaccacagaggcattgatgccagagatgtctcccaggtccacatcagggctggtgtggttcttgaagtatttgtccagttcctccttgaaggagtccagttcaggttggagtgggtcatagactgtgttgttcacaatgccaatcaccacatcacagttgccagacacaaaggtgttgtctgtggtgataatctgtggttcatagaagttcctctgggtcacaaaccagtgggtgccattgctcacaaacactccctcccttggaaagtgagccttgccatcatggcagatggcaggggctgtggtgaagttcttctcctgggcaggcacataggtcacatgcaggaacaccactccatgaggggcagactgtggaaaactcatcaggtggtagcccttgccacagaagtccaccctcttgctttgtcccagcacacactcactcatcttggtggcagccaggttggcagatgccctaatctcagcagccctgataagttgttgggtcacataggtttggagggattggagtctgcctgtaatcagtctgtcaatctggacctcagcctccaccttgtccagtctgctcaggatgtcattcagcacagaggagatggctccaaagttgctggaaagttgcttcaccagggtgttcagagcctgggcattctggttcaccacatcttggagtttgcccagggcagaggctgtgctggacagggagtcctgaatcttgccaatggcagagttgaactggttggcaatcagtttctggttctcatagagcacattctgggtcactccaatgccattgaacctgtaagccatctgcatagcaaatgggatttggagggctgctcctgctccaaaggtccagccagaggtgatggtgccagccagcagggcagaggtgtattgggcaatcatctcatctgtcagcagtggaggcagcactgtcagtccattgaacttctgggcacaaatcaggtccctggcagcaatgtctcccagacagtctccatattgcttgatgaagccagcatcagccagggtcaccttgttgaacagcaggtcctcaatgaaggacctcttgcttggcttgcttgggtcaggcagaatctggctgaagttgaagcctccaaagtccttgattggaggtgtcttgtaaatctgcttcacctgggcaaacacctcctgggtgttcttgtcctgttccacagcaatgcctgtcagagccctgttaagttgggtacagaaggagccatattggagcagcaggttgctacactctgtgctgtctccacagatatacattgtacagtccacagaggtcttggtcatactcacaggcagaatctctgtggtcacagagatggtgaagttggttgggatggcaatgctgttgttgctgtaagccacagagttctctgctcccagactcattgtgtaggcaatgatgctctggcttgccacagacctcgacccaccgccaccggtctgggtctggtaggaggcacagatgcctgctccaattgggatgtcacactcataggagttgttcacatgctctgctccaatcagacagccagccctggtctggaacacattgctgcctgtgctgtagaccctccaggttggtgtaagttggtcagcatggatagccacaggcacctcagtacagttcacatcctggtagagcacagccacctggttgctggtgttggtgccaggtgtaatcacagacactcctccaaaggaacatggtgtgatgtccagaatctccaaggtctgtgggtccctcacagcatctgtggtgtcagcaatgtccctgccaaactgttggaatggcaggaacttcttgttgctctctgtcagcactcctgtgcctgtcagtccattgaagttgaagttcacacacttgttcttcaccaggttggtgctcttctttggtccacacactgtggcaggggcatggagcagttcaaaggacagcaccaccaccctgtatggttggtagcccactccattggttggttggaagccataggattggagtggaaagtaacagttgaagccctccactccattacatggtgtgctgccagcctggtaaatctctgtgctgatgtccctctcaaatggtttcaggttgctcttcctgaacagtctgtagaggtagttgtagttgcctcccaccttgctgtccaggttgttgctgttccaggcaatcacacagcctgtgaagtcatcaggcagtttgtagttgtagtcagcaatcttgcctgtttgtccaggggcaatctgtctcacctcatctcccctaatcacaaaggagtcagcatagacattggtgaaacacaggtcattcagtttggttgggctcactccataacacttgaaggtgctgaaggaggcagagttgtagagcacagagtagtcagccacacagttgctaatcctcttcctgttccaggcatagacagaggcaaacctggtggcattgaacacctctccaaatggacacaggttggtgatgtttggaaacctcacaatgctctctgttggttggaccctgaagttgctggtctggtagatgcccttctccactgtgaaggatttcagggtacacttggtctcagacagtgggtccagggcacagtccacagcatctgtgatggtgccattctcattgtatttcagcaggaaggtccttggttggaggtagcccacatagtaggctgctgctcctgctgtccagccagaggaggagtctccaggtgtcaggtaggacctgtgcagagccagcagggtctggaacctggtgatgttgatgccaattggcaggtccaccagtggttccaaggcagagaagccctgtggcaggtccctcaccaggttgattggtgtgtgtttgctgtaaatcttgaagtagccatcaatgttcttgaacacaaactccctcaggttcttgaagttgccctgcttgccctccaagtccatcaggaatggttggctcacatattcaaaggtacagttgttggcagaggagtagaccctgaactcagactccatccaggacttgttgttcttgtggtagtagactcccaggaatgggtcattacagaactggaactcacacaccttaatcaccacattggtggcattgttcacaatcagcagggactgggtcttgctgtccagggtggtgccaaaaatccagcccctgatgatgttgctcttctctgtgctggcaaagtagactccatcattgaatggcagcacagggttgtcaaacctcttggtgccattggtgccagacacatggatggcatggaaccaggtcacattgctgaagaatggcaggaacaggtcctgggtgctgtgcagcacagaggacctgaacaccttgtcagggtagtagactcccctggtgaaggagttggtgtaggcaggaggaagttgggtcctggtggtcaggttcacacactggctggacaccagtggcagcagcaccaggaacacaaacatggtggcaaatcggaggctggatcggtcccggtgtcttctatggaggtcaaaacagcgtggatggcgtctccaggcgatctgacggttcactaaacgagctcgtcgacgatctctatcactgatagggagatctctatcactgatagggagagctctgcttatatagacctcccaccgtacacgcctaccgcccatttgcgtcaatggggcggagttgttacgacattttggaaagtcccgttgattttggtgccaaaacaaactcccattgacgtcaatggggtggagacttggaaatccccgtgagtcaaaccgctatccacgcccattgatgtactgccaaaaccgcatcaccatggtaatagcgatgactaatacgtagatgtactgccaagtaggaaagtcccataaggtcatgtactgggcataatgccaggcgggccatttaccgtcattgacgtcaatagggggcgtacttggcatatgatacacttgatgtactgccaagtgggcagtttaccgtaaatactccacccattgacgtcaatggaaagtccctattggcgttactatgggaacatacgtcattattgacgtcaatgggcgggggtcgttgggcggtcagccaggcgggccatttaccgtaagttatgtaacgcggaactccatatatgggctatgaactaatgaccccgtaattgattactattacagcgttacataacttacggtaaatggcccgcctggctgaccgcccaacgacccccgcccattgacgtcaataatgacgtatgttcccatagtaacgccaatagggactttccattgacgtcaatgggtggagtatttacggtaaactgcccacttggcagtacatcaagtgtatcatatgccaagtacgccccctattgacgtcaatgacggtaaatggcccgcctggcattatgcccagtacatgaccttatgggactttcctacttggcagtacatctacgtattagtcatcgctattaccatggtgatgcggttttggcagtacatcaatgggcgtggatagcggtttgactcacggggatttccaagtctccaccccattgacgtcaatgggagtttgttttggcaccaaaatcaacgggactttccaaaatgtcgtaacaactccgccccattgacgcaaatgggcggtaggcgtgtacggtgggaggtctatataagcagagctaaactaccccaagctggccaccatgactacgtccggcgttccatttggcatgacactacgaccaacacgatctcggttgtctcggcgcactccgtacagtagggatcgtctacctccttttgagacagaaacccgcgctaccatactggaggatcatccgctgctgcccgaatgtaacactttgacaatgcacaacgtgagttacgtgcgaggtcttccctgcagtgtgggatttacgctgattcaggaatgggttgttccctgggatatggttctaacgcgggaggagcttgtaatcctgaggaagtgtatgcacgtgtgcctgtgttgtgccaacattgatatcatgacgagcatgatgatccatggttacgagtcctgggctctccactgtcattgttccagtcccggttccctgcagtgtatagccggcgggcaggttttggccagctggtttaggatggtggtggatggcgccatgtttaatcagaggtttatatggtaccgggaggtggtgaattacaacatgccaaaagaggtaatgtttatgtccagcgtgtttatgaggggtcgccacttaatctacctgcgcttgtggtatgatggccacgtgggttctgtggtccccgccatgagctttggatacagcgccttgcactgtgggattttgaacaatattgtggtgctgtgctgcagttactgtgctgatttaagtgagatcagggtgcgctgctgtgcccggaggacaaggcgccttatgctgcgggcggtgcgaatcatcgctgaggagaccactgccatgttgtattcctgcaggacggagcggcggcggcagcagtttattcgcgcgctgctgcagcaccaccgccctatcctgatgcacgattatgactctacccccatgtagaagcttggggatcaattctctagagctcgctgatcagcctcgactgtgccttctagttgccagccatctgttgtttgcccctcccccgtgccttccttgaccctggaaggtgccactcccactgtcctttcctaataaaatgaggaaattgcatcgcattgtctgagtaggtgtcattctattctggggggtggggtggggcaggacagcaagggggaggattgggaagacaatagcaggcatgctggggatgcggtgggctctatggcttctgaggaaattgggcgtggcttaagggtgggaaagaatatataaggtgggggtcttatgtagttttgtatctgttttgcagcagccgccgccgccatgagcaccaactcgtttgatggaagcattgtgagctcatatttgacaacgcgcatgcccccatgggccggggtgcgtcagaatgtgatgggctccagcattgatggtcgccccgtcctgcccgcaaactctactaccttgacctacgagaccgtgtctggaacgccgttggagactgcagcctccgccgccgcttcagccgctgcagccaccgcccgcgggattgtgactgactttgctttcctgagcccgcttgcaagcagtgcagcttcccgttcatccgcccgcgatgacaagttgacggctcttttggcacaattggattctttgacccgggaacttaatgtcgtttctcagcagctgttggatctgcgccagcaggtttctgccctgaaggcttcctcccctcccaatgcggtttaaaacataaataaaaaaccagactctgtttggatttggatcaagcaagtgtcttgctgtctttatttaggggttttgcgcgcgcggtaggcccgggaccagcggtctcggtcgttgagggtcctgtgtattttttccaggacgtggtaaaggtgactctggatgttcagatacatgggcataagcccgtctctggggtggaggtagcaccactgcagagcttcatgctgcggggtggtgttgtagatgatccagtcgtagcaggagcgctgggcgtggtgcctaaaaatgtctttcagtagcaagctgattgccaggggcaggcccttggtgtaagtgtttacaaagcggttaagctgggatgggtgcatacgtggggatatgagatgcatcttggactgtatttttaggttggctatgttcccagccatatccctccggggattcatgttgtgcagaaccaccagcacagtgtatccggtgcacttgggaaatttgtcatgtagcttagaaggaaatgcgtggaagaacttggagacgcccttgtgacctccaagattttccatgcattcgtccataatgatggcaatgggcccacgggcggcggcctgggcgaagatatttctgggatcactaacgtcatagttgtgttccaggatgagatcgtcataggccatttttacaaagcgcgggcggagggtgccagactgcggtataatggttccatccggcccaggggcgtagttaccctcacagatttgcatttcccacgctttgagttcagatggggggatcatgtctacctgcggggcgatgaagaaaacggtttccggggtaggggagatcagctgggaagaaagcaggttcctgagcagctgcgacttaccgcagccggtgggcccgtaaatcacacctattaccgggtgcaactggtagttaagagagctgcagctgccgtcatccctgagcaggggggccacttcgttaagcatgtccctgactcgcatgttttccctgaccaaatccgccagaaggcgctcgccgcccagcgatagcagttcttgcaaggaagcaaagtttttcaacggtttgagaccgtccgccgtaggcatgcttttgagcgtttgaccaagcagttccaggcggtcccacagctcggtcacctgctctacggcatctcgatccagcatatctcctcgtttcgcgggttggggcggctttcgctgtacggcagtagtcggtgctcgtccagacgggccagggtcatgtctttccacgggcgcagggtcctcgtcagcgtagtctgggtcacggtgaaggggtgcgctccgggctgcgcgctggccagggtgcgcttgaggctggtcctgctggtgctgaagcgctgccggtcttcgccctgcgcgtcggccaggtagcatttgaccatggtgtcatagtccagcccctccgcggcgtggcccttggcgcgcagcttgcccttggaggaggcgccgcacgaggggcagtgcagacttttgagggcgtagagcttgggcgcgagaaataccgattccggggagtaggcatccgcgccgcaggccccgcagacggtctcgcattccacgagccaggtgagctctggccgttcggggtcaaaaaccaggtttcccccatgctttttgatgcgtttcttacctctggtttccatgagccggtgtccacgctcggtgacgaaaaggctgtccgtgtccccgtatacagacttgagaggcctgtcctcgagcggtgttccgcggtcctcctcgtatagaaactcggaccactctgagacaaaggctcgcgtccaggccagcacgaaggaggctaagtgggaggggtagcggtcgttgtccactagggggtccactcgctccagggtgtgaagacacatgtcgccctcttcggcatcaaggaaggtgattggtttgtaggtgtaggccacgtgaccgggtgttcctgaaggggggctataaaagggggtgggggcgcgttcgtcctcactctcttccgcatcgctgtctgcgagggccagctgttggggtgagtactccctctgaaaagcgggcatgacttctgcgctaagattgtcagtttccaaaaacgaggaggatttgatattcacctggcccgcggtgatgcctttgagggtggccgcatccatctggtcagaaaagacaatctttttgttgtcaagcttggtggcaaacgacccgtagagggcgttggacagcaacttggcgatggagcgcagggtttggtttttgtcgcgatcggcgcgctccttggccgcgatgtttagctgcacgtattcgcgcgcaacgcaccgccattcgggaaagacggtggtgcgctcgtcgggcaccaggtgcacgcgccaaccgcggttgtgcagggtgacaaggtcaacgctggtggctacctctccgcgtaggcgctcgttggtccagcagaggcggccgcccttgcgcgagcagaatggcggtagggggtctagctgcgtctcgtccggggggtctgcgtccacggtaaagaccccgggcagcaggcgcgcgtcgaagtagtctatcttgcatccttgcaagtctagcgcctgctgccatgcgcgggcggcaagcgcgcgctcgtatgggttgagtgggggaccccatggcatggggtgggtgagcgcggaggcgtacatgccgcaaatgtcgtaaacgtagaggggctctctgagtattccaagatatgtagggtagcatcttccaccgcggatgctggcgcgcacgtaatcgtatagttcgtgcgagggagcgaggaggtcgggaccgaggttgctacgggcgggctgctctgctcggaagactatctgcctgaagatggcatgtgagttggatgatatggttggacgctggaagacgttgaagctggcgtctgtgagacctaccgcgtcacgcacgaaggaggcgtaggagtcgcgcagcttgttgaccagctcggcggtgacctgcacgtctagggcgcagtagtccagggtttccttgatgatgtcatacttatcctgtcccttttttttccacagctcgcggttgaggacaaactcttcgcggtctttccagtactcttggatcggaaacccgtcggcctccgaacggtaagagcctagcatgtagaactggttgacggcctggtaggcgcagcatcccttttctacgggtagcgcgtatgcctgcgcggccttccggagcgaggtgtgggtgagcgcaaaggtgtccctgaccatgactttgaggtactggtatttgaagtcagtgtcgtcgcatccgccctgctcccagagcaaaaagtccgtgcgctttttggaacgcggatttggcagggcgaaggtgacatcgttgaagagtatctttcccgcgcgaggcataaagttgcgtgtgatgcggaagggtcccggcacctcggaacggttgttaattacctgggcggcgagcacgatctcgtcaaagccgttgatgttgtggcccacaatgtaaagttccaagaagcgcgggatgcccttgatggaaggcaattttttaagttcctcgtaggtgagctcttcaggggagctgagcccgtgctctgaaagggcccagtctgcaagatgagggttggaagcgacgaatgagctccacaggtcacgggccattagcatttgcaggtggtcgcgaaaggtcctaaactggcgacctatggccattttttctggggtgatgcagtagaaggtaagcgggtcttgttcccagcggtcccatccaaggttcgcggctaggtctcgcgcggcagtcactagaggctcatctccgccgaacttcatgaccagcatgaagggcacgagctgcttcccaaaggcccccatccaagtataggtctctacatcgtaggtgacaaagagacgctcggtgcgaggatgcgagccgatcgggaagaactggatctcccgccaccaattggaggagtggctattgatgtggtgaaagtagaagtccctgcgacgggccgaacactcgtgctggcttttgtaaaaacgtgcgcagtactggcagcggtgcacgggctgtacatcctgcacgaggttgacctgacgaccgcgcacaaggaagcagagtgggaatttgagcccctcgcctggcgggtttggctggtggtcttctacttcggctgcttgtccttgaccgtctggctgctcgaggggagttacggtggatcggaccaccacgccgcgcgagcccaaagtccagatgtccgcgcgcggcggtcggagcttgatgacaacatcgcgcagatgggagctgtccatggtctggagctcccgcggcgtcaggtcaggcgggagctcctgcaggtttacctcgcatagacgggtcagggcgcgggctagatccaggtgatacctaatttccaggggctggttggtggcggcgtcgatggcttgcaagaggccgcatccccgcggcgcgactacggtaccgcgcggcgggcggtgggccgcgggggtgtccttggatgatgcatctaaaagcggtgacgcgggcgagcccccggaggtagggggggctccggacccgccgggagagggggcaggggcacgtcggcgccgcgcgcgggcaggagctggtgctgcgcgcgtaggttgctggcgaacgcgacgacgcggcggttgatctcctgaatctggcgcctctgcgtgaagacgacgggcccggtgagcttgaacctgaaagagagttcgacagaatcaatttcggtgtcgttgacggcggcctggcgcaaaatctcctgcacgtctcctgagttgtcttgataggcgatctcggccatgaactgctcgatctcttcctcctggagatctccgcgtccggctcgctccacggtggcggcgaggtcgttggaaatgcgggccatgagctgcgagaaggcgttgaggcctccctcgttccagacgcggctgtagaccacgcccccttcggcatcgcgggcgcgcatgaccacctgcgcgagattgagctccacgtgccgggcgaagacggcgtagtttcgcaggcgctgaaagaggtagttgagggtggtggcggtgtgttctgccacgaagaagtacataacccagcgtcgcaacgtggattcgttgatatcccccaaggcctcaaggcgctccatggcctcgtagaagtccacggcgaagttgaaaaactgggagttgcgcgccgacacggttaactcctcctccagaagacggatgagctcggcgacagtgtcgcgcacctcgcgctcaaaggctacaggggcctcttcttcttcttcaatctcctcttccataagggcctccccttcttcttcttctggcggcggtgggggaggggggacacggcggcgacgacggcgcaccgggaggcggtcgacaaagcgctcgatcatctccccgcggcgacggcgcatggtctcggtgacggcgcggccgttctcgcgggggcgcagttggaagacgccgcccgtcatgtcccggttatgggttggcggggggctgccatgcggcagggatacggcgctaacgatgcatctcaacaattgttgtgtaggtactccgccgccgagggacctgagcgagtccgcatcgaccggatcggaaaacctctcgagaaaggcgtctaaccagtcacagtcgcaaggtaggctgagcaccgtggcgggcggcagcgggcggcggtcggggttgtttctggcggaggtgctgctgatgatgtaattaaagtaggcggtcttgagacggcggatggtcgacagaagcaccatgtccttgggtccggcctgctgaatgcgcaggcggtcggccatgccccaggcttcgttttgacatcggcgcaggtctttgtagtagtcttgcatgagcctttctaccggcacttcttcttctccttcctcttgtcctgcatctcttgcatctatcgctgcggcggcggcggagtttggccgtaggtggcgccctcttcctcccatgcgtgtgaccccgaagcccctcatcggctgaagcagggctaggtcggcgacaacgcgctcggctaatatggcctgctgcacctgcgtgagggtagactggaagtcatccatgtccacaaagcggtggtatgcgcccgtgttgatggtgtaagtgcagttggccataacggaccagttaacggtctggtgacccggctgcgagagctcggtgtacctgagacgcgagtaagccctcgagtcaaatacgtagtcgttgcaagtccgcaccaggtactggtatcccaccaaaaagtgcggcggcggctggcggtagaggggccagcgtagggtggccggggctccgggggcgagatcttccaacataaggcgatgatatccgtagatgtacctggacatccaggtgatgccggcggcggtggtggaggcgcgcggaaagtcgcggacgcggttccagatgttgcgcagcggcaaaaagtgctccatggtcgggacgctctggccggtcaggcgcgcgcaatcgttgacgctctagcgtgcaaaaggagagcctgtaagcgggcactcttccgtggtctggtggataaattcgcaagggtatcatggcggacgaccggggttcgagccccgtatccggccgtccgccgtgatccatgcggttaccgcccgcgtgtcgaacccaggtgtgcgacgtcagacaacgggggagtgctccttttggcttccttccaggcgcggcggctgctgcgctagcttttttggccactggccgcgcgcagcgtaagcggttaggctggaaagcgaaagcattaagtggctcgctccctgtagccggagggttattttccaagggttgagtcgcgggacccccggttcgagtctcggaccggccggactgcggcgaacgggggtttgcctccccgtcatgcaagaccccgcttgcaaattcctccggaaacagggacgagccccttttttgcttttcccagatgcatccggtgctgcggcagatgcgcccccctcctcagcagcggcaagagcaagagcagcggcagacatgcagggcaccctcccctcctcctaccgcgtcaggaggggcgacatccgcggttgacgcggcagcagatggtgattacgaacccccgcggcgccgggcccggcactacctggacttggaggagggcgagggcctggcgcggctaggagcgccctctcctgagcggcacccaagggtgcagctgaagcgtgatacgcgtgaggcgtacgtgccgcggcagaacctgtttcgcgaccgcgagggagaggagcccgaggagatgcgggatcgaaagttccacgcagggcgcgagctgcggcatggcctgaatcgcgagcggttgctgcgcgaggaggactttgagcccgacgcgcgaaccgggattagtcccgcgcgcgcacacgtggcggccgccgacctggtaaccgcatacgagcagacggtgaaccaggagattaactttcaaaaaagctttaacaaccacgtgcgtacgcttgtggcgcgcgaggaggtggctataggactgatgcatctgtgggactttgtaagcgcgctggagcaaaacccaaatagcaagccgctcatggcgcagctgttccttatagtgcagcacagcagggacaacgaggcattcagggatgcgctgctaaacatagtagagcccgagggccgctggctgctcgatttgataaacatcctgcagagcatagtggtgcaggagcgcagcttgagcctggctgacaaggtggccgccatcaactattccatgcttagcctgggcaagttttacgcccgcaagatataccataccccttacgttcccatagacaaggaggtaaagatcgaggggttctacatgcgcatggcgctgaaggtgcttaccttgagcgacgacctgggcgtttatcgcaacgagcgcatccacaaggccgtgagcgtgagccggcggcgcgagctcagcgaccgcgagctgatgcacagcctgcaaagggccctggctggcacgggcagcggcgatagagaggccgagtcctactttgacgcgggcgctgacctgcgctgggccccaagccgacgcgccctggaggcagctggggccggacctgggctggcggtggcacccgcgcgcgctggcaacgtcggcggcgtggaggaatatgacgaggacgatgagtacgagccagaggacggcgagtactaagcggtgatgtttctgatcagatgatgcaagacgcaacggacccggcggtgcgggcggcgctgcagagccagccgtccggccttaactccacggacgactggcgccaggtcatggaccgcatcatgtcgctgactgcgcgcaatcctgacgcgttccggcagcagccgcaggccaaccggctctccgcaattctggaagcggtggtcccggcgcgcgcaaaccccacgcacgagaaggtgctggcgatcgtaaacgcgctggccgaaaacagggccatccggcccgacgaggccggcctggtctacgacgcgctgcttcagcgcgtggctcgttacaacagcggcaacgtgcagaccaacctggaccggctggtgggggatgtgcgcgaggccgtggcgcagcgtgagcgcgcgcagcagcagggcaacctgggctccatggttgcactaaacgccttcctgagtacacagcccgccaacgtgccgcggggacaggaggactacaccaactttgtgagcgcactgcggctaatggtgactgagacaccgcaaagtgaggtgtaccagtctgggccagactattttttccagaccagtagacaaggcctgcagaccgtaaacctgagccaggctttcaaaaacttgcaggggctgtggggggtgcgggctcccacaggcgaccgcgcgaccgtgtctagcttgctgacgcccaactcgcgcctgttgctgctgctaatagcgcccttcacggacagtggcagcgtgtcccgggacacatacctaggtcacttgctgacactgtaccgcgaggccataggtcaggcgcatgtggacgagcatactttccaggagattacaagtgtcagccgcgcgctggggcaggaggacacgggcagcctggaggcaaccctaaactacctgctgaccaaccggcggcagaagatcccctcgttgcacagtttaaacagcgaggaggagcgcattttgcgctacgtgcagcagagcgtgagccttaacctgatgcgcgacggggtaacgcccagcgtggcgctggacatgaccgcgcgcaacatggaaccgggcatgtatgcctcaaaccggccgtttatcaaccgcctaatggactacttgcatcgcgcggccgccgtgaaccccgagtatttcaccaatgccatcttgaacccgcactggctaccgccccctggtttctacaccgggggattcgaggtgcccgagggtaacgatggattcctctgggacgacatagacgacagcgtgttttccccgcaaccgcagaccctgctagagttgcaacagcgcgagcaggcagaggcggcgctgcgaaaggaaagcttccgcaggccaagcagcttgtccgatctaggcgctgcggccccgcggtcagatgctagtagcccatttccaagcttgatagggtctcttaccagcactcgcaccacccgcccgcgcctgctgggcgaggaggagtacctaaacaactcgctgctgcagccgcagcgcgaaaaaaacctgcctccggcatttcccaacaacgggatagagagcctagtggacaagatgagtagatggaagacgtacgcgcaggagcacagggacgtgccaggcccgcgcccgcccacccgtcgtcaaaggcacgaccgtcagcggggtctggtgtgggaggacgatgactcggcagacgacagcagcgtcctggatttgggagggagtggcaacccgtttgcgcaccttcgccccaggctggggagaatgttttaaaaaaaaaaaagcatgatgcaaaataaaaaactcaccaaggccatggcaccgagcgttggttttcttgtattccccttagtatgcggcgcgcggcgatgtatgaggaaggtcctcctccctcctacgagagtgtggtgagcgcggcgccagtggcggcggcgctgggttctcccttcgatgctcccctggacccgccgtttgtgcctccgcggtacctgcggcctaccggggggagaaacagcatccgttactctgagttggcacccctattcgacaccacccgtgtgtacctggtggacaacaagtcaacggatgtggcatccctgaactaccagaacgaccacagcaactttctgaccacggtcattcaaaacaatgactacagcccgggggaggcaagcacacagaccatcaatcttgacgaccggtcgcactggggcggcgacctgaaaaccatcctgcataccaacatgccaaatgtgaacgagttcatgtttaccaataagtttaaggcgcgggtgatggtgtcgcgcttgcctactaaggacaatcaggtggagctgaaatacgagtgggtggagttcacgctgcccgagggcaactactccgagaccatgaccatagaccttatgaacaacgcgatcgtggagcactacttgaaagtgggcagacagaacggggttctggaaagcgacatcggggtaaagtttgacacccgcaacttcagactggggtttgaccccgtcactggtcttgtcatgcctggggtatatacaaacgaagccttccatccagacatcattttgctgccaggatgcggggtggacttcacccacagccgcctgagcaacttgttgggcatccgcaagcggcaacccttccaggagggctttaggatcacctacgatgatctggagggtggtaacattcccgcactgttggatgtggacgcctaccaggcgagcttgaaagatgacaccgaacagggcgggggtggcgcaggcggcagcaacagcagtggcagcggcgcggaagagaactccaacgcggcagccgcggcaatgcagccggtggaggacatgaacgatcatgccattcgcggcgacacctttgccacacgggctgaggagaagcgcgctgaggccgaagcagcggccgaagctgccgcccccgctgcgcaacccgaggtcgagaagcctcagaagaaaccggtgatcaaacccctgacagaggacagcaagaaacgcagttacaacctaataagcaatgacagcaccttcacccagtaccgcagctggtaccttgcatacaactacggcgaccctcagaccggaatccgctcatggaccctgctttgcactcctgacgtaacctgcggctcggagcaggtctactggtcgttgccagacatgatgcaagaccccgtgaccttccgctccacgcgccagatcagcaactttccggtggtgggcgccgagctgttgcccgtgcactccaagagcttctacaacgaccaggccgtctactcccaactcatccgccagtttacctctctgacccacgtgttcaatcgctttcccgagaaccagattttggcgcgcccgccagcccccaccatcaccaccgtcagtgaaaacgttcctgctctcacagatcacgggacgctaccgctgcgcaacagcatcggaggagtccagcgagtgaccattactgacgccagacgccgcacctgcccctacgtttacaaggccctgggcatagtctcgccgcgcgtcctatcgagccgcactttttgagcaagcatgtccatccttatatcgcccagcaataacacaggctggggcctgcgcttcccaagcaagatgtttggcggggccaagaagcgctccgaccaacacccagtgcgcgtgcgcgggcactaccgcgcgccctggggcgcgcacaaacgcggccgcactgggcgcaccaccgtcgatgacgccatcgacgcggtggtggaggaggcgcgcaactacacgcccacgccgccaccagtgtccacagtggacgcggccattcagaccgtggtgcgcggagcccggcgctatgctaaaatgaagagacggcggaggcgcgtagcacgtcgccaccgccgccgacccggcactgccgcccaacgcgcggcggcggccctgcttaaccgcgcacgtcgcaccggccgacgggcggccatgcgggccgctcgaaggctggccgcgggtattgtcactgtgccccccaggtccaggcgacgagcggccgccgcagcagccgcggccattagtgctatgactcagggtcgcaggggcaacgtgtattgggtgcgcgactcggttagcggcctgcgcgtgcccgtgcgcacccgccccccgcgcaactagattgcaagaaaaaactacttagactcgtactgttgtatgtatccagcggcggcggcgcgcaacgaagctatgtccaagcgcaaaatcaaagaagagatgctccaggtcatcgcgccggagatctatggccccccgaagaaggaagagcaggattacaagccccgaaagctaaagcgggtcaaaaagaaaaagaaagatgatgatgatgaacttgacgacgaggtggaactgctgcacgctaccgcgcccaggcgacgggtacagtggaaaggtcgacgcgtaaaacgtgttttgcgacccggcaccaccgtagtctttacgcccggtgagcgctccacccgcacctacaagcgcgtgtatgatgaggtgtacggcgacgaggacctgcttgagcaggccaacgagcgcctcggggagtttgcctacggaaagcggcataaggacatgctggcgttgccgctggacgagggcaacccaacacctagcctaaagcccgtaacactgcagcaggtgctgcccgcgcttgcaccgtccgaagaaaagcgcggcctaaagcgcgagtctggtgacttggcacccaccgtgcagctgatggtacccaagcgccagcgactggaagatgtcttggaaaaaatgaccgtggaacctgggctggagcccgaggtccgcgtgcggccaatcaagcaggtggcgccgggactgggcgtgcagaccgtggacgttcagatacccactaccagtagcaccagtattgccaccgccacagagggcatggagacacaaacgtccccggttgcctcagcggtggcggatgccgcggtgcaggcggtcgctgcggccgcgtccaagacctctacggaggtgcaaacggacccgtggatgtttcgcgtttcagccccccggcgcccgcgccgttcgaggaagtacggcgccgccagcgcgctactgcccgaatatgccctacatccttccattgcgcctacccccggctatcgtggctacacctaccgccccagaagacgagcaactacccgacgccgaaccaccactggaacccgccgccgccgtcgccgtcgccagcccgtgctggccccgatttccgtgcgcagggtggctcgcgaaggaggcaggaccctggtgctgccaacagcgcgctaccaccccagcatcgtttaaaagccggtctttgtggttcttgcagatatggccctcacctgccgcctccgtttcccggtgccgggattccgaggaagaatgcaccgtaggaggggcatggccggccacggcctgacgggcggcatgcgtcgtgcgcaccaccggcggcggcgcgcgtcgcaccgtcgcatgcgcggcggtatcctgcccctccttattccactgatcgccgcggcgattggcgccgtgcccggaattgcatccgtggccttgcaggcgcagagacactgattaaaaacaagttgcatgtggaaaaatcaaaataaaaagtctggactctcacgctcgcttggtcctgtaactattttgtagaatggaagacatcaactttgcgtctctggccccgcgacacggctcgcgcccgttcatgggaaactggcaagatatcggcaccagcaatatgagcggtggcgccttcagctggggctcgctgtggagcggcattaaaaatttcggttccaccgttaagaactatggcagcaaggcctggaacagcagcacaggccagatgctgagggataagttgaaagagcaaaatttccaacaaaaggtggtagatggcctggcctctggcattagcggggtggtggacctggccaaccaggcagtgcaaaataagattaacagtaagcttgatccccgccctcccgtagaggagcctccaccggccgtggagacagtgtctccagaggggcgtggcgaaaagcgtccgcgccccgacagggaagaaactctggtgacgcaaatagacgagcctccctcgtacgaggaggcactaaagcaaggcctgcccaccacccgtcccatcgcgcccatggctaccggagtgctgggccagcacacacccgtaacgctggacctgcctccccccgccgacacccagcagaaacctgtgctgccaggcccgaccgccgttgttgtaacccgtcctagccgcgcgtccctgcgccgcgccgccagcggtccgcgatcgttgcggcccgtagccagtggcaactggcaaagcacactgaacagcatcgtgggtctgggggtgcaatccctgaagcgccgacgatgcttctgatagctaacgtgtcgtatgtgtgtcatgtatgcgtccatgtcgccgccagaggagctgctgagccgccgcgcgcccgctttccaagatggctaccccttcgatgatgccgcagtggtcttacatgcacatctcgggccaggacgcctcggagtacctgagccccgggctggtgcagtttgcccgcgccaccgagacgtacttcagcctgaataacaagtttagaaaccccacggtggcgcctacgcacgacgtgaccacagaccggtcccagcgtttgacgctgcggttcatccctgtggaccgtgaggatactgcgtactcgtacaaggcgcggttcaccctagctgtgggtgataaccgtgtgctggacatggcttccacgtactttgacatccgcggcgtgctggacaggggccctacttttaagccctactctggcactgcctacaacgccctggctcccaagggtgccccaaatccttgcgaatgggatgaagctgctactgctcttgaaataaacctagaagaagaggacgatgacaacgaagacgaagtagacgagcaagctgagcagcaaaaaactcacgtatttgggcaggcgccttattctggtataaatattacaaaggagggtattcaaataggtgtcgaaggtcaaacacctaaatatgccgataaaacatttcaacctgaacctcaaataggagaatctcagtggtacgaaacagaaattaatcatgcagctgggagagtcctaaaaaagactaccccaatgaaaccatgttacggttcatatgcaaaacccacaaatgaaaatggagggcaaggcattcttgtaaagcaacaaaatggaaagctagaaagtcaagtggaaatgcaatttttctcaactactgaggcagccgcaggcaatggtgataacttgactcctaaagtggtattgtacagtgaagatgtagatatagaaaccccagacactcatatttcttacatgcccactattaaggaaggtaactcacgagaactaatgggccaacaatctatgcccaacaggcctaattacattgcttttagggacaattttattggtctaatgtattacaacagcacgggtaatatgggtgttctggcgggccaagcatcgcagttgaatgctgttgtagatttgcaagacagaaacacagagctttcataccagcttttgcttgattccattggtgatagaaccaggtacttttctatgtggaatcaggctgttgacagctatgatccagatgttagaattattgaaaatcatggaactgaagatgaacttccaaattactgctttccactgggaggtgtgattaatacagagactcttaccaaggtaaaacctaaaacaggtcaggaaaatggatgggaaaaagatgctacagaattttcagataaaaatgaaataagagttggaaataattttgccatggaaatcaatctaaatgccaacctgtggagaaatttcctgtactccaacatagcgctgtatttgcccgacaagctaaagtacagtccttccaacgtaaaaatttctgataacccaaacacctacgactacatgaacaagcgagtggtggctcccgggctagtggactgctacattaaccttggagcacgctggtcccttgactatatggacaacgtcaacccatttaaccaccaccgcaatgctggcctgcgctaccgctcaatgttgctgggcaatggtcgctatgtgcccttccacatccaggtgcctcagaagttctttgccattaaaaacctccttctcctgccgggctcatacacctacgagtggaacttcaggaaggatgttaacatggttctgcagagctccctaggaaatgacctaagggttgacggagccagcattaagtttgatagcatttgcctttacgccaccttcttccccatggcccacaacaccgcctccacgcttgaggccatgcttagaaacgacaccaacgaccagtcctttaacgactatctctccgccgccaacatgctctaccctatacccgccaacgctaccaacgtgcccatatccatcccctcccgcaactgggcggctttccgcggctgggccttcacgcgccttaagactaaggaaaccccatcactgggctcgggctacgacccttattacacctactctggctctataccctacctagatggaaccttttacctcaaccacacctttaagaaggtggccattacctttgactcttctgtcagctggcctggcaatgaccgcctgcttacccccaacgagtttgaaattaagcgctcagttgacggggagggttacaacgttgcccagtgtaacatgaccaaagactggttcctggtacaaatgctagctaactataacattggctaccagggcttctatatcccagagagctacaaggaccgcatgtactccttctttagaaacttccagcccatgagccgtcaggtggtggatgatactaaatacaaggactaccaacaggtgggcatcctacaccaacacaacaactctggatttgttggctaccttgcccccaccatgcgcgaaggacaggcctaccctgctaacttcccctatccgcttataggcaagaccgcagttgacagcattacccagaaaaagtttctttgcgatcgcaccctttggcgcatcccattctccagtaactttatgtccatgggcgcactcacagacctgggccaaaaccttctctacgccaactccgcccacgcgctagacatgacttttgaggtggatcccatggacgagcccacccttctttatgttttgtttgaagtctttgacgtggtccgtgtgcaccagccgcaccgcggcgtcatcgaaaccgtgtacctgcgcacgcccttctcggccggcaacgccacaacataaagaagcaagcaacatcaacaacagctgccgccatgggctccagtgagcaggaactgaaagccattgtcaaagatcttggttgtgggccatattttttgggcacctatgacaagcgctttccaggctttgtttctccacacaagctcgcctgcgccatagtcaatacggccggtcgcgagactgggggcgtacactggatggcctttgcctggaacccgcactcaaaaacatgctacctctttgagccctttggcttttctgaccagcgactcaagcaggtttaccagtttgagtacgagtcactcctgcgccgtagcgccattgcttcttcccccgaccgctgtataacgctggaaaagtccacccaaagcgtacaggggcccaactcggccgcctgtggactattctgctgcatgtttctccacgcctttgccaactggccccaaactcccatggatcacaaccccaccatgaaccttattaccggggtacccaactccatgctcaacagtccccaggtacagcccaccctgcgtcgcaaccaggaacagctctacagcttcctggagcgccactcgccctacttccgcagccacagtgcgcagattaggagcgccacttctttttgtcacttgaaaaacatgtaaaaataatgtactagagacactttcaataaaggcaaatgcttttatttgtacactctcgggtgattatttacccccacccttgccgtctgcgccgtttaaaaatcaaaggggttctgccgcgcatcgctatgcgccactggcagggacacgttgcgatactggtgtttagtgctccacttaaactcaggcacaaccatccgcggcagctcggtgaagttttcactccacaggctgcgcaccatcaccaacgcgtttagcaggtcgggcgccgatatcttgaagtcgcagttggggcctccgccctgcgcgcgcgagttgcgatacacagggttgcagcactggaacactatcagcgccgggtggtgcacgctggccagcacgctcttgtcggagatcagatccgcgtccaggtcctccgcgttgctcagggcgaacggagtcaactttggtagctgccttcccaaaaagggcgcgtgcccaggctttgagttgcactcgcaccgtagtggcatcaaaaggtgaccgtgcccggtctgggcgttaggatacagcgcctgcataaaagccttgatctgcttaaaagccacctgagcctttgcgccttcagagaagaacatgccgcaagacttgccggaaaactgattggccggacaggccgcgtcgtgcacgcagcaccttgcgtcggtgttggagatctgcaccacatttcggccccaccggttcttcacgatcttggccttgctagactgctccttcagcgcgcgctgcccgttttcgctcgtcacatccatttcaatcacgtgctccttatttatcataatgcttccgtgtagacacttaagctcgccttcgatctcagcgcagcggtgcagccacaacgcgcagcccgtgggctcgtgatgcttgtaggtcacctctgcaaacgactgcaggtacgcctgcaggaatcgccccatcatcgtcacaaaggtcttgttgctggtgaaggtcagctgcaacccgcggtgctcctcgttcagccaggtcttgcatacggccgccagagcttccacttggtcaggcagtagtttgaagttcgcctttagatcgttatccacgtggtacttgtccatcagcgcgcgcgcagcctccatgcccttctcccacgcagacacgatcggcacactcagcgggttcatcaccgtaatttcactttccgcttcgctgggctcttcctcttcctcttgcgtccgcataccacgcgccactgggtcgtcttcattcagccgccgcactgtgcgcttacctcctttgccatgcttgattagcaccggtgggttgctgaaacccaccatttgtagcgccacatcttctctttcttcctcgctgtccacgattacctctggtgatggcgggcgctcgggcttgggagaagggcgcttctttttcttcttgggcgcaatggccaaatccgccgccgaggtcgatggccgcgggctgggtgtgcgcggcaccagcgcgtcttgtgatgagtcttcctcgtcctcggactcgatacgccgcctcatccgcttttttgggggcgcccggggaggcggcggcgacggggacggggacgacacgtcctccatggttgggggacgtcgcgccgcaccgcgtccgcgctcgggggtggtttcgcgctgctcctcttcccgactggccatttccttctcctataggcagaaaaagatcatggagtcagtcgagaagaaggacagcctaaccgccccctctgagttcgccaccaccgcctccaccgatgccgccaacgcgcctaccaccttccccgtcgaggcacccccgcttgaggaggaggaagtgattatcgagcaggacccaggttttgtaagcgaagacgacgaggaccgctcagtaccaacagaggataaaaagcaagaccaggacaacgcagaggcaaacgaggaacaagtcgggcggggggacgaaaggcatggcgactacctagatgtgggagacgacgtgctgttgaagcatctgcagcgccagtgcgccattatctgcgacgcgttgcaagagcgcagcgatgtgcccctcgccatagcggatgtcagccttgcctacgaacgccacctattctcaccgcgcgtaccccccaaacgccaagaaaacggcacatgcgagcccaacccgcgcctcaacttctaccccgtatttgccgtgccagaggtgcttgccacctatcacatctttttccaaaactgcaagatacccctatcctgccgtgccaaccgcagccgagcggacaagcagctggccttgcggcagggcgctgtcatacctgatatcgcctcgctcaacgaagtgccaaaaatctttgagggtcttggacgcgacgagaagcgcgcggcaaacgctctgcaacaggaaaacagcgaaaatgaaagtcactctggagtgttggtggaactcgagggtgacaacgcgcgcctagccgtactaaaacgcagcatcgaggtcacccactttgcctacccggcacttaacctaccccccaaggtcatgagcacagtcatgagtgagctgatcgtgcgccgtgcgcagcccctggagagggatgcaaatttgcaagaacaaacagaggagggcctacccgcagttggcgacgagcagctagcgcgctggcttcaaacgcgcgagcctgccgacttggaggagcgacgcaaactaatgatggccgcagtgctcgttaccgtggagcttgagtgcatgcagcggttctttgctgacccggagatgcagcgcaagctagaggaaacattgcactacacctttcgacagggctacgtacgccaggcctgcaagatctccaacgtggagctctgcaacctggtctcctaccttggaattttgcacgaaaaccgccttgggcaaaacgtgcttcattccacgctcaagggcgaggcgcgccgcgactacgtccgcgactgcgtttacttatttctatgctacacctggcagacggccatgggcgtttggcagcagtgcttggaggagtgcaacctcaaggagctgcagaaactgctaaagcaaaacttgaaggacctatggacggccttcaacgagcgctccgtggccgcgcacctggcggacatcattttccccgaacgcctgcttaaaaccctgcaacagggtctgccagacttcaccagtcaaagcatgttgcagaactttaggaactttatcctagagcgctcaggaatcttgcccgccacctgctgtgcacttcctagcgactttgtgcccattaagtaccgcgaatgccctccgccgctttggggccactgctaccttctgcagctagccaactaccttgcctaccactctgacataatggaagacgtgagcggtgacggtctactggagtgtcactgtcgctgcaacctatgcaccccgcaccgctccctggtttgcaattcgcagctgcttaacgaaagtcaaattatcggtacctttgagctgcagggtccctcgcctgacgaaaagtccgcggctccggggttgaaactcactccggggctgtggacgtcggcttaccttcgcaaatttgtacctgaggactaccacgcccacgagattaggttctacgaagaccaatcccgcccgcctaatgcggagcttaccgcctgcgtcattacccagggccacattcttggccaattgcaagccatcaacaaagcccgccaagagtttctgctacgaaagggacggggggtttacttggacccccagtccggcgaggagctcaacccaatccccccgccgccgcagccctatcagcagcagccgcgggcccttgcttcccaggatggcacccaaaaagaagctgcagctgccgccgccacccacggacgaggaggaatactgggacagtcaggcagaggaggttttggacgaggaggaggaggacatgatggaagactgggagagcctagacgaggaagcttccgaggtcgaagaggtgtcagacgaaacaccgtcaccctcggtcgcattcccctcgccggcgccccagaaatcggcaaccggttccagcatggctacaacctccgctcctcaggcgccgccggcactgcccgttcgccgacccaaccgtagatgggacaccactggaaccagggccggtaagtccaagcagccgccgccgttagcccaagagcaacaacagcgccaaggctaccgctcatggcgcgggcacaagaacgccatagttgcttgcttgcaagactgtgggggcaacatctccttcgcccgccgctttcttctctaccatcacggcgtggccttcccccgtaacatcctgcattactaccgtcatctctacagcccatactgcaccggcggcagcggcagcaacagcagcggccacacagaagcaaaggcgaccggatagcaagactctgacaaagcccaagaaatccacagcggcggcagcagcaggaggaggagcgctgcgtctggcgcccaacgaacccgtatcgacccgcgagcttagaaacaggatttttcccactctgtatgctatatttcaacagagcaggggccaagaacaagagctgaaaataaaaaacaggtctctgcgatccctcacccgcagctgcctgtatcacaaaagcgaagatcagcttcggcgcacgctggaagacgcggaggctctcttcagtaaatactgcgcgctgactcttaaggactagtttcgcgccctttctcaaatttaagcgcgaaaactacgtcatctccagcggccacacccggcgccagcacctgttgtcagcgccattatgagcaaggaaattcccacgccctacatgtggagttaccagccacaaatgggacttgcggctggagctgcccaagactactcaacccgaataaactacatgagcgcgggaccccacatgatatcccgggtcaacggaatacgcgcccaccgaaaccgaattctcctggaacaggcggctattaccaccacacctcgtaataaccttaatccccgtagttggcccgctgccctggtgtaccaggaaagtcccgctcccaccactgtggtacttcccagagacgcccaggccgaagttcagatgactaactcaggggcgcagcttgcgggcggctttcgtcacagggtgcggtcgcccgggcagggtataactcacctgacaatcagagggcgaggtattcagctcaacgacgagtcggtgagctcctcgcttggtctccgtccggacgggacatttcagatcggcggcgccggccgctcttcattcacgcctcgtcaggcaatcctaactctgcagacctcgtcctctgagccgcgctctggaggcattggaactctgcaatttattgaggagtttgtgccatcggtctactttaaccccttctcgggacctcccggccactatccggatcaatttattcctaactttgacgcggtaaaggactcggcggacggctacgactgaatgttaagtggagaggcagagcaactgcgcctgaaacacctggtccactgtcgccgccacaagtgctttgcccgcgactccggtgagttttgctactttgaattgcccgaggatcatatcgagggcccggcgcacggcgtccggcttaccgcccagggagagcttgcccgtagcctgattcgggagtttacccagcgccccctgctagttgagcgggacaggggaccctgtgttctcactgtgatttgcaactgtcctaaccctggattacatcaagatcctctagttaatgtcaggtcgcctaagtcgattaactagagtacccggggatcttattccctttaactaataaaaaaaaataataaagcatcacttacttaaaatcagttagcaaatttctgtccagtttattcagcagcacctccttgccctcctcccagctctggtattgcagcttcctcctggctgcaaactttctccacaatctaaatggaatgtcagtttcctcctgttcctgtccatccgcacccactatcttcatgttgttgcagatgaagcgcgcaagaccgtctgaagataccttcaaccccgtgtatccatatgacacggaaaccggtcctccaactgtgccttttcttactcctccctttgtatcccccaatgggtttcaagagagtccccctggggtactctctttgcgcctatccgaacctctagttacctccaatggcatgcttgcgctcaaaatgggcaacggcctctctctggacgaggccggcaaccttacctcccaaaatgtaaccactgtgagcccacctctcaaaaaaaccaagtcaaacataaacctggaaatatctgcacccctcacagttacctcagaagccctaactgtggctgccgccgcacctctaatggtcgcgggcaacacactcaccatgcaatcacaggccccgctaaccgtgcacgactccaaacttagcattgccacccaaggacccctcacagtgtcagaaggaaagctagccctgcaaacatcaggccccctcaccaccaccgatagcagtacccttactatcactgcctcaccccctctaactactgccactggtagcttgggcattgacttgaaagagcccatttatacacaaaatggaaaactaggactaaagtacggggctcctttgcatgtaacagacgacctaaacactttgaccgtagcaactggtccaggtgtgactattaataatacttccttgcaaactaaagttactggagccttgggttttgattcacaaggcaatatgcaacttaatgtagcaggaggactaaggattgattctcaaaacagacgccttatacttgatgttagttatccgtttgatgctcaaaaccaactaaatctaagactaggacagggccctctttttataaactcagcccacaacttggatattaactacaacaaaggcctttacttgtttacagcttcaaacaattccaaaaagcttgaggttaacctaagcactgccaaggggttgatgtttgacgctacagccatagccattaatgcaggagatgggcttgaatttggttcacctaatgcaccaaacacaaatcccctcaaaacaaaaattggccatggcctagaatttgattcaaacaaggctatggttcctaaactaggaactggccttagttttgacagcacaggtgccattacagtaggaaacaaaaataatgataagctaactttgtggaccggaataaaccctccacctaactgtcaaattgtggaaaacactaatacaaatgatggcaaacttactttagtattagtaaaaaatggagggcttgttaatggctacgtgtctctagttggtgtatcagacactgtgaaccaaatgttcacacaaaagacagcaaacatccaattaagattatattttgactcttctggaaatctattaactgaggaatcagacttaaaaattccacttaaaaataaatcttctacagcgaccagtgaaactgtagccagcagcaaagcctttatgccaagtactacagcttatcccttcaacaccactactagggatagtgaaaactacattcatggaatatgttactacatgactagttatgatagaagtctatttcccttgaacatttctataatgctaaacagccgtatgatttcttccaatgttgcctatgccatacaatttgaatggaatctaaatgcaagtgaatctccagaaagcaacatagctacgctgaccacatccccctttttcttttcttacattacagaagacgacaactaaagaatcgtttgtgttatgtttcaacgtgtttatttttcaattgcagaaaatttcaagtcatttttcattcagtagtatagccccaccaccacatagcttatacagatcaccgtaccttaatcaaactcacagaaccctagtattcaacctgccacctccctcccaacacacagagtacacagtcctttctccccggctggccttaaaaagcatcatatcatgggtaacagacatattcttaggtgttatattccacacggtttcctgtcgagccaaacgctcatcagtgatattaataaactccccgggcagctcacttaagttcatgtcgctgtccagctgctgagccacaggctgctgtccaacttgcggttgcttaacgggcggcgaaggagaagtccacgcctacatgggggtagagtcataatcgtgcatcaggatagggcggtggtgctgcagcagcgcgcgaataaactgctgccgccgccgctccgtcctgcaggaatacaacatggcagtggtctcctcagcgatgattcgcaccgcccgcagcataaggcgccttgtcctccgggcacagcagcgcaccctgatctcacttaaatcagcacagtaactgcagcacagcaccacaatattgttcaaaatcccacagtgcaaggcgctgtatccaaagctcatggcggggaccacagaacccacgtggccatcataccacaagcgcaggtagattaagtggcgacccctcataaacacgctggacataaacattacctcttttggcatgttgtaattcaccacctcccctctgattaaacatggcgccatccaccaccatcctaaaccagctggccaaaacctgcccgccggctatacactgcagggaaccgggactggaacaatgacagtggagagcccaggactcgtaaccatggatcatcatgctcgtcatgatatcaatgttggcacaacacaggcacacgtgcatacacttcctcaggattacaagctcctcccgcgttagaaccatatcccagggaacaacccattcctgaatcagcgtaaatcccacactgcagggaagacctcgcacgtaactcacgttgtgcattgtcaaagtgttacattcgggcagcagcggatgatcctccagtatggtagcgcgggtttctgtctcaaaaggaggtagacgatccctactgtacggagtgcgccgagacaaccgagatcgtgttggtcgtagtgtcatgccaaatggaacgccggacgtagtcatatttcctgaagcaaaaccaggtgcgggcgtgacaaacagatctgcgtctccggtctcgccgcttagatcgctctgtgtagtagttgtagtatatccactctctcaaagcatccaggcgccccctggcttcgggttctatgtaaactccttcatgcgccgctgccctgataacatccaccaccgcagaataagccacacccagccaacctacacattcgttctgcgagtcacacacgggaggagcgggaagagctggaagaaccatgtttttttttttattccaaaagattatccaaaacctcaaaatgaagatctattaagtgaacgcgctcccctccggtggcgtggtcaaactctacagccaaagaacagataatggcatttgtaagatgttgcacaatggcttccaaaaggcaaacggccctcacgtccaagtggacgtaaaggctaaacccttcagggtgaatctcctctataaacattccagcaccttcaaccatgcccaaataattctcatctcgccaccttctcaatatatctctaagcaaatcccgaatattaagtccggccattgtaaaaatctgctccagagcgccctccaccttcagcctcaagcagcgaatcatgattgcaaaaattcaggttcctcacagacctgtataagattcaaaagcggaacattaacaaaaataccgcgatcccgtaggtcccttcgcagggccagctgaacataatcgtgcaggtctgcacggaccagcgcggccacttccccgccaggaaccatgacaaaagaacccacactgattatgacacgcatactcggagctatgctaaccagcgtagccccgatgtaagcttgttgcatgggcggcgatataaaatgcaaggtgctgctcaaaaaatcaggcaaagcctcgcgcaaaaaagaaagcacatcgtagtcatgctcatgcagataaaggcaggtaagctccggaaccaccacagaaaaagacaccatttttctctcaaacatgtctgcgggtttctgcataaacacaaaataaaataacaaaaaaacatttaaacattagaagcctgtcttacaacaggaaaaacaacccttataagcataagacggactacggccatgccggcgtgaccgtaaaaaaactggtcaccgtgattaaaaagcaccaccgacagctcctcggtcatgtccggagtcataatgtaagactcggtaaacacatcaggttgattcacatcggtcagtgctaaaaagcgaccgaaatagcccgggggaatacatacccgcaggcgtagagacaacattacagcccccataggaggtataacaaaattaataggagagaaaaacacataaacacctgaaaaaccctcctgcctaggcaaaatagcaccctcccgctccagaacaacatacagcgcttccacagcggcagccataacagtcagccttaccagtaaaaaagaaaacctattaaaaaaacaccactcgacacggcaccagctcaatcagtcacagtgtaaaaaagggccaagtgcagagcgagtatatataggactaaaaaatgacgtaacggttaaagtccacaaaaaacacccagaaaaccgcacgcgaacctacgcccagaaacgaaagccaaaaaacccacaacttcctcaaatcgtcacttccgttttcccacgttacgtcacttcccattttaagaaaactacaattcccaacacatacaagttactccgccctaaaacctacgtcacccgccccgttcccacgccccgcgccacgtcacaaactccaccccctcattatcatattggcttcaatccaaaataaggtatattattgatgatg

SEQ ID NO: 27 - DNA, 36151 bp, Artificial Sequence
  pAdk35RF-Spike/E4orf6(-0.5kb)-E4dl355(E4re#22)
ttaattaacatcatcaataatataccttattttggattgaagccaatatgataatgagggggtggagtttgtgacgtggcgcggggcgtgggaacggggcgggtgacgtagtagtgtggcggaagtgtgatgttgcaagtgtggcggaacacatgtaagcgacggatgtggcaaaagtgacgtttttggtgtgcgccggtgtacacaggaagtgacaattttcgcgcggttttaggcggatgttgtagtaaatttgggcgtaaccgagtaagatttggccattttcgcgggaaaactgaataagaggaagtgaaatctgaataattttgtgttactcatagcgcgtaataatttgatccgcgttaagatacattgatgagtttggacaaaccacaactagaatgcagtgaaaaaaatgctttatttgtgaaatttgtgatgctattgctttatttgtaaccattataagctgcaataaacaagttaacaacaacaattgcattcattttatgtttcaggttcagggggaggtgtgggaggttttttaaagcaagtaaaacctctacaaatgtggtatggctgattatgatcaattttcatggccacttgatgtattgttcatatttgcccagttcttggaggtcaatcagggactcattcaggttcttagccacctcattcagtctgtcaatctccttctggatgttcaccacagaggcattgatgccagagatgtctcccaggtccacatcagggctggtgtggttcttgaagtatttgtccagttcctccttgaaggagtccagttcaggttggagtgggtcatagactgtgttgttcacaatgccaatcaccacatcacagttgccagacacaaaggtgttgtctgtggtgataatctgtggttcatagaagttcctctgggtcacaaaccagtgggtgccattgctcacaaacactccctcccttggaaagtgagccttgccatcatggcagatggcaggggctgtggtgaagttcttctcctgggcaggcacataggtcacatgcaggaacaccactccatgaggggcagactgtggaaaactcatcaggtggtagcccttgccacagaagtccaccctcttgctttgtcccagcacacactcactcatcttggtggcagccaggttggcagatgccctaatctcagcagccctgataagttgttgggtcacataggtttggagggattggagtctgcctgtaatcagtctgtcaatctggacctcagcctccaccttgtccagtctgctcaggatgtcattcagcacagaggagatggctccaaagttgctggaaagttgcttcaccagggtgttcagagcctgggcattctggttcaccacatcttggagtttgcccagggcagaggctgtgctggacagggagtcctgaatcttgccaatggcagagttgaactggttggcaatcagtttctggttctcatagagcacattctgggtcactccaatgccattgaacctgtaagccatctgcatagcaaatgggatttggagggctgctcctgctccaaaggtccagccagaggtgatggtgccagccagcagggcagaggtgtattgggcaatcatctcatctgtcagcagtggaggcagcactgtcagtccattgaacttctgggcacaaatcaggtccctggcagcaatgtctcccagacagtctccatattgcttgatgaagccagcatcagccagggtcaccttgttgaacagcaggtcctcaatgaaggacctcttgcttggcttgcttgggtcaggcagaatctggctgaagttgaagcctccaaagtccttgattggaggtgtcttgtaaatctgcttcacctgggcaaacacctcctgggtgttcttgtcctgttccacagcaatgcctgtcagagccctgttaagttgggtacagaaggagccatattggagcagcaggttgctacactctgtgctgtctccacagatatacattgtacagtccacagaggtcttggtcatactcacaggcagaatctctgtggtcacagagatggtgaagttggttgggatggcaatgctgttgttgctgtaagccacagagttctctgctcccagactcattgtgtaggcaatgatgctctggcttgccacagacctcgacccaccgccaccggtctgggtctggtaggaggcacagatgcctgctccaattgggatgtcacactcataggagttgttcacatgctctgctccaatcagacagccagccctggtctggaacacattgctgcctgtgctgtagaccctccaggttggtgtaagttggtcagcatggatagccacaggcacctcagtacagttcacatcctggtagagcacagccacctggttgctggtgttggtgccaggtgtaatcacagacactcctccaaaggaacatggtgtgatgtccagaatctccaaggtctgtgggtccctcacagcatctgtggtgtcagcaatgtccctgccaaactgttggaatggcaggaacttcttgttgctctctgtcagcactcctgtgcctgtcagtccattgaagttgaagttcacacacttgttcttcaccaggttggtgctcttctttggtccacacactgtggcaggggcatggagcagttcaaaggacagcaccaccaccctgtatggttggtagcccactccattggttggttggaagccataggattggagtggaaagtaacagttgaagccctccactccattacatggtgtgctgccagcctggtaaatctctgtgctgatgtccctctcaaatggtttcaggttgctcttcctgaacagtctgtagaggtagttgtagttgcctcccaccttgctgtccaggttgttgctgttccaggcaatcacacagcctgtgaagtcatcaggcagtttgtagttgtagtcagcaatcttgcctgtttgtccaggggcaatctgtctcacctcatctcccctaatcacaaaggagtcagcatagacattggtgaaacacaggtcattcagtttggttgggctcactccataacacttgaaggtgctgaaggaggcagagttgtagagcacagagtagtcagccacacagttgctaatcctcttcctgttccaggcatagacagaggcaaacctggtggcattgaacacctctccaaatggacacaggttggtgatgtttggaaacctcacaatgctctctgttggttggaccctgaagttgctggtctggtagatgcccttctccactgtgaaggatttcagggtacacttggtctcagacagtgggtccagggcacagtccacagcatctgtgatggtgccattctcattgtatttcagcaggaaggtccttggttggaggtagcccacatagtaggctgctgctcctgctgtccagccagaggaggagtctccaggtgtcaggtaggacctgtgcagagccagcagggtctggaacctggtgatgttgatgccaattggcaggtccaccagtggttccaaggcagagaagccctgtggcaggtccctcaccaggttgattggtgtgtgtttgctgtaaatcttgaagtagccatcaatgttcttgaacacaaactccctcaggttcttgaagttgccctgcttgccctccaagtccatcaggaatggttggctcacatattcaaaggtacagttgttggcagaggagtagaccctgaactcagactccatccaggacttgttgttcttgtggtagtagactcccaggaatgggtcattacagaactggaactcacacaccttaatcaccacattggtggcattgttcacaatcagcagggactgggtcttgctgtccagggtggtgccaaaaatccagcccctgatgatgttgctcttctctgtgctggcaaagtagactccatcattgaatggcagcacagggttgtcaaacctcttggtgccattggtgccagacacatggatggcatggaaccaggtcacattgctgaagaatggcaggaacaggtcctgggtgctgtgcagcacagaggacctgaacaccttgtcagggtagtagactcccctggtgaaggagttggtgtaggcaggaggaagttgggtcctggtggtcaggttcacacactggctggacaccagtggcagcagcaccaggaacacaaacatggtggcaaatcggaggctggatcggtcccggtgtcttctatggaggtcaaaacagcgtggatggcgtctccaggcgatctgacggttcactaaacgagctcgtcgacgatctctatcactgatagggagatctctatcactgatagggagagctctgcttatatagacctcccaccgtacacgcctaccgcccatttgcgtcaatggggcggagttgttacgacattttggaaagtcccgttgattttggtgccaaaacaaactcccattgacgtcaatggggtggagacttggaaatccccgtgagtcaaaccgctatccacgcccattgatgtactgccaaaaccgcatcaccatggtaatagcgatgactaatacgtagatgtactgccaagtaggaaagtcccataaggtcatgtactgggcataatgccaggcgggccatttaccgtcattgacgtcaatagggggcgtacttggcatatgatacacttgatgtactgccaagtgggcagtttaccgtaaatactccacccattgacgtcaatggaaagtccctattggcgttactatgggaacatacgtcattattgacgtcaatgggcgggggtcgttgggcggtcagccaggcgggccatttaccgtaagttatgtaacgcggaactccatatatgggctatgaactaatgaccccgtaattgattactattacagcttcccgctcctcccgtgtgtgactcgcagaacgaatgtgtaggttggctgggtgtggcttattctgcggtggtggatgttatcagggcagcggcgcatgaaggagtttacatagaacccgaagccagggggcgcctggatgctttgagagagtggatatactacaactactacacagagcgatctaagcggcgagaccggagacgcagatctgtttgtcacgcccgcacctggttttgcttcaggaaatatgactacgtccggcgttccatttggcatgacactacgaccaacacgatctcggttgtctcggcgcactccgtacagtagggatcgtctacctccttttgagacagaaacccgcgctaccatactggaggatcatccgctgctgcccgaatgtaacactttgacaatgcacaacgtgagttacgtgcgaggtcttccctgcagtgtgggatttacgctgattcaggaatgggttgttccctgggatatggttctaacgcgggaggagcttgtaatcctgaggaagtgtatgcacgtgtgcctgtgttgtgccaacattgatatcatgacgagcatgatgatccatggttacgagtcctgggctctccactgtcattgttccagtcccggttccctgcagtgtatagccggcgggcaggttttggccagctggtttaggatggtggtggatggcgccatgtttaatcagaggtttatatggtaccgggaggtggtgaattacaacatgccaaaagaggtaatgtttatgtccagcgtgtttatgaggggtcgccacttaatctacctgcgcttgtggtatgatggccacgtgggttctgtggtccccgccatgagctttggatacagcgccttgcactgtgggattttgaacaatattgtggtgctgtgctgcagttactgtgctgatttaagtgagatcagggtgcgctgctgtgcccggaggacaaggcgccttatgctgcgggcggtgcgaatcatcgctgaggagaccactgccatgttgtattcctgcaggacggagcggcggcggcagcagtttattcgcgcgctgctgcagcaccaccgccctatcctgatgcacgattatgactctacccccatgtagaagcttggggatcaattctctagagctcgctgatcagcctcgactgtgccttctagttgccagccatctgttgtttgcccctcccccgtgccttccttgaccctggaaggtgccactcccactgtcctttcctaataaaatgaggaaattgcatcgcattgtctgagtaggtgtcattctattctggggggtggggtggggcaggacagcaagggggaggattgggaagacaatagcaggcatgctggggatgcggtgggctctatggcttctgaggaaattgggcgtggcttaagggtgggaaagaatatataaggtgggggtcttatgtagttttgtatctgttttgcagcagccgccgccgccatgagcaccaactcgtttgatggaagcattgtgagctcatatttgacaacgcgcatgcccccatgggccggggtgcgtcagaatgtgatgggctccagcattgatggtcgccccgtcctgcccgcaaactctactaccttgacctacgagaccgtgtctggaacgccgttggagactgcagcctccgccgccgcttcagccgctgcagccaccgcccgcgggattgtgactgactttgctttcctgagcccgcttgcaagcagtgcagcttcccgttcatccgcccgcgatgacaagttgacggctcttttggcacaattggattctttgacccgggaacttaatgtcgtttctcagcagctgttggatctgcgccagcaggtttctgccctgaaggcttcctcccctcccaatgcggtttaaaacataaataaaaaaccagactctgtttggatttggatcaagcaagtgtcttgctgtctttatttaggggttttgcgcgcgcggtaggcccgggaccagcggtctcggtcgttgagggtcctgtgtattttttccaggacgtggtaaaggtgactctggatgttcagatacatgggcataagcccgtctctggggtggaggtagcaccactgcagagcttcatgctgcggggtggtgttgtagatgatccagtcgtagcaggagcgctgggcgtggtgcctaaaaatgtctttcagtagcaagctgattgccaggggcaggcccttggtgtaagtgtttacaaagcggttaagctgggatgggtgcatacgtggggatatgagatgcatcttggactgtatttttaggttggctatgttcccagccatatccctccggggattcatgttgtgcagaaccaccagcacagtgtatccggtgcacttgggaaatttgtcatgtagcttagaaggaaatgcgtggaagaacttggagacgcccttgtgacctccaagattttccatgcattcgtccataatgatggcaatgggcccacgggcggcggcctgggcgaagatatttctgggatcactaacgtcatagttgtgttccaggatgagatcgtcataggccatttttacaaagcgcgggcggagggtgccagactgcggtataatggttccatccggcccaggggcgtagttaccctcacagatttgcatttcccacgctttgagttcagatggggggatcatgtctacctgcggggcgatgaagaaaacggtttccggggtaggggagatcagctgggaagaaagcaggttcctgagcagctgcgacttaccgcagccggtgggcccgtaaatcacacctattaccgggtgcaactggtagttaagagagctgcagctgccgtcatccctgagcaggggggccacttcgttaagcatgtccctgactcgcatgttttccctgaccaaatccgccagaaggcgctcgccgcccagcgatagcagttcttgcaaggaagcaaagtttttcaacggtttgagaccgtccgccgtaggcatgcttttgagcgtttgaccaagcagttccaggcggtcccacagctcggtcacctgctctacggcatctcgatccagcatatctcctcgtttcgcgggttggggcggctttcgctgtacggcagtagtcggtgctcgtccagacgggccagggtcatgtctttccacgggcgcagggtcctcgtcagcgtagtctgggtcacggtgaaggggtgcgctccgggctgcgcgctggccagggtgcgcttgaggctggtcctgctggtgctgaagcgctgccggtcttcgccctgcgcgtcggccaggtagcatttgaccatggtgtcatagtccagcccctccgcggcgtggcccttggcgcgcagcttgcccttggaggaggcgccgcacgaggggcagtgcagacttttgagggcgtagagcttgggcgcgagaaataccgattccggggagtaggcatccgcgccgcaggccccgcagacggtctcgcattccacgagccaggtgagctctggccgttcggggtcaaaaaccaggtttcccccatgctttttgatgcgtttcttacctctggtttccatgagccggtgtccacgctcggtgacgaaaaggctgtccgtgtccccgtatacagacttgagaggcctgtcctcgagcggtgttccgcggtcctcctcgtatagaaactcggaccactctgagacaaaggctcgcgtccaggccagcacgaaggaggctaagtgggaggggtagcggtcgttgtccactagggggtccactcgctccagggtgtgaagacacatgtcgccctcttcggcatcaaggaaggtgattggtttgtaggtgtaggccacgtgaccgggtgttcctgaaggggggctataaaagggggtgggggcgcgttcgtcctcactctcttccgcatcgctgtctgcgagggccagctgttggggtgagtactccctctgaaaagcgggcatgacttctgcgctaagattgtcagtttccaaaaacgaggaggatttgatattcacctggcccgcggtgatgcctttgagggtggccgcatccatctggtcagaaaagacaatctttttgttgtcaagcttggtggcaaacgacccgtagagggcgttggacagcaacttggcgatggagcgcagggtttggtttttgtcgcgatcggcgcgctccttggccgcgatgtttagctgcacgtattcgcgcgcaacgcaccgccattcgggaaagacggtggtgcgctcgtcgggcaccaggtgcacgcgccaaccgcggttgtgcagggtgacaaggtcaacgctggtggctacctctccgcgtaggcgctcgttggtccagcagaggcggccgcccttgcgcgagcagaatggcggtagggggtctagctgcgtctcgtccggggggtctgcgtccacggtaaagaccccgggcagcaggcgcgcgtcgaagtagtctatcttgcatccttgcaagtctagcgcctgctgccatgcgcgggcggcaagcgcgcgctcgtatgggttgagtgggggaccccatggcatggggtgggtgagcgcggaggcgtacatgccgcaaatgtcgtaaacgtagaggggctctctgagtattccaagatatgtagggtagcatcttccaccgcggatgctggcgcgcacgtaatcgtatagttcgtgcgagggagcgaggaggtcgggaccgaggttgctacgggcgggctgctctgctcggaagactatctgcctgaagatggcatgtgagttggatgatatggttggacgctggaagacgttgaagctggcgtctgtgagacctaccgcgtcacgcacgaaggaggcgtaggagtcgcgcagcttgttgaccagctcggcggtgacctgcacgtctagggcgcagtagtccagggtttccttgatgatgtcatacttatcctgtcccttttttttccacagctcgcggttgaggacaaactcttcgcggtctttccagtactcttggatcggaaacccgtcggcctccgaacggtaagagcctagcatgtagaactggttgacggcctggtaggcgcagcatcccttttctacgggtagcgcgtatgcctgcgcggccttccggagcgaggtgtgggtgagcgcaaaggtgtccctgaccatgactttgaggtactggtatttgaagtcagtgtcgtcgcatccgccctgctcccagagcaaaaagtccgtgcgctttttggaacgcggatttggcagggcgaaggtgacatcgttgaagagtatctttcccgcgcgaggcataaagttgcgtgtgatgcggaagggtcccggcacctcggaacggttgttaattacctgggcggcgagcacgatctcgtcaaagccgttgatgttgtggcccacaatgtaaagttccaagaagcgcgggatgcccttgatggaaggcaattttttaagttcctcgtaggtgagctcttcaggggagctgagcccgtgctctgaaagggcccagtctgcaagatgagggttggaagcgacgaatgagctccacaggtcacgggccattagcatttgcaggtggtcgcgaaaggtcctaaactggcgacctatggccattttttctggggtgatgcagtagaaggtaagcgggtcttgttcccagcggtcccatccaaggttcgcggctaggtctcgcgcggcagtcactagaggctcatctccgccgaacttcatgaccagcatgaagggcacgagctgcttcccaaaggcccccatccaagtataggtctctacatcgtaggtgacaaagagacgctcggtgcgaggatgcgagccgatcgggaagaactggatctcccgccaccaattggaggagtggctattgatgtggtgaaagtagaagtccctgcgacgggccgaacactcgtgctggcttttgtaaaaacgtgcgcagtactggcagcggtgcacgggctgtacatcctgcacgaggttgacctgacgaccgcgcacaaggaagcagagtgggaatttgagcccctcgcctggcgggtttggctggtggtcttctacttcggctgcttgtccttgaccgtctggctgctcgaggggagttacggtggatcggaccaccacgccgcgcgagcccaaagtccagatgtccgcgcgcggcggtcggagcttgatgacaacatcgcgcagatgggagctgtccatggtctggagctcccgcggcgtcaggtcaggcgggagctcctgcaggtttacctcgcatagacgggtcagggcgcgggctagatccaggtgatacctaatttccaggggctggttggtggcggcgtcgatggcttgcaagaggccgcatccccgcggcgcgactacggtaccgcgcggcgggcggtgggccgcgggggtgtccttggatgatgcatctaaaagcggtgacgcgggcgagcccccggaggtagggggggctccggacccgccgggagagggggcaggggcacgtcggcgccgcgcgcgggcaggagctggtgctgcgcgcgtaggttgctggcgaacgcgacgacgcggcggttgatctcctgaatctggcgcctctgcgtgaagacgacgggcccggtgagcttgaacctgaaagagagttcgacagaatcaatttcggtgtcgttgacggcggcctggcgcaaaatctcctgcacgtctcctgagttgtcttgataggcgatctcggccatgaactgctcgatctcttcctcctggagatctccgcgtccggctcgctccacggtggcggcgaggtcgttggaaatgcgggccatgagctgcgagaaggcgttgaggcctccctcgttccagacgcggctgtagaccacgcccccttcggcatcgcgggcgcgcatgaccacctgcgcgagattgagctccacgtgccgggcgaagacggcgtagtttcgcaggcgctgaaagaggtagttgagggtggtggcggtgtgttctgccacgaagaagtacataacccagcgtcgcaacgtggattcgttgatatcccccaaggcctcaaggcgctccatggcctcgtagaagtccacggcgaagttgaaaaactgggagttgcgcgccgacacggttaactcctcctccagaagacggatgagctcggcgacagtgtcgcgcacctcgcgctcaaaggctacaggggcctcttcttcttcttcaatctcctcttccataagggcctccccttcttcttcttctggcggcggtgggggaggggggacacggcggcgacgacggcgcaccgggaggcggtcgacaaagcgctcgatcatctccccgcggcgacggcgcatggtctcggtgacggcgcggccgttctcgcgggggcgcagttggaagacgccgcccgtcatgtcccggttatgggttggcggggggctgccatgcggcagggatacggcgctaacgatgcatctcaacaattgttgtgtaggtactccgccgccgagggacctgagcgagtccgcatcgaccggatcggaaaacctctcgagaaaggcgtctaaccagtcacagtcgcaaggtaggctgagcaccgtggcgggcggcagcgggcggcggtcggggttgtttctggcggaggtgctgctgatgatgtaattaaagtaggcggtcttgagacggcggatggtcgacagaagcaccatgtccttgggtccggcctgctgaatgcgcaggcggtcggccatgccccaggcttcgttttgacatcggcgcaggtctttgtagtagtcttgcatgagcctttctaccggcacttcttcttctccttcctcttgtcctgcatctcttgcatctatcgctgcggcggcggcggagtttggccgtaggtggcgccctcttcctcccatgcgtgtgaccccgaagcccctcatcggctgaagcagggctaggtcggcgacaacgcgctcggctaatatggcctgctgcacctgcgtgagggtagactggaagtcatccatgtccacaaagcggtggtatgcgcccgtgttgatggtgtaagtgcagttggccataacggaccagttaacggtctggtgacccggctgcgagagctcggtgtacctgagacgcgagtaagccctcgagtcaaatacgtagtcgttgcaagtccgcaccaggtactggtatcccaccaaaaagtgcggcggcggctggcggtagaggggccagcgtagggtggccggggctccgggggcgagatcttccaacataaggcgatgatatccgtagatgtacctggacatccaggtgatgccggcggcggtggtggaggcgcgcggaaagtcgcggacgcggttccagatgttgcgcagcggcaaaaagtgctccatggtcgggacgctctggccggtcaggcgcgcgcaatcgttgacgctctagcgtgcaaaaggagagcctgtaagcgggcactcttccgtggtctggtggataaattcgcaagggtatcatggcggacgaccggggttcgagccccgtatccggccgtccgccgtgatccatgcggttaccgcccgcgtgtcgaacccaggtgtgcgacgtcagacaacgggggagtgctccttttggcttccttccaggcgcggcggctgctgcgctagcttttttggccactggccgcgcgcagcgtaagcggttaggctggaaagcgaaagcattaagtggctcgctccctgtagccggagggttattttccaagggttgagtcgcgggacccccggttcgagtctcggaccggccggactgcggcgaacgggggtttgcctccccgtcatgcaagaccccgcttgcaaattcctccggaaacagggacgagccccttttttgcttttcccagatgcatccggtgctgcggcagatgcgcccccctcctcagcagcggcaagagcaagagcagcggcagacatgcagggcaccctcccctcctcctaccgcgtcaggaggggcgacatccgcggttgacgcggcagcagatggtgattacgaacccccgcggcgccgggcccggcactacctggacttggaggagggcgagggcctggcgcggctaggagcgccctctcctgagcggcacccaagggtgcagctgaagcgtgatacgcgtgaggcgtacgtgccgcggcagaacctgtttcgcgaccgcgagggagaggagcccgaggagatgcgggatcgaaagttccacgcagggcgcgagctgcggcatggcctgaatcgcgagcggttgctgcgcgaggaggactttgagcccgacgcgcgaaccgggattagtcccgcgcgcgcacacgtggcggccgccgacctggtaaccgcatacgagcagacggtgaaccaggagattaactttcaaaaaagctttaacaaccacgtgcgtacgcttgtggcgcgcgaggaggtggctataggactgatgcatctgtgggactttgtaagcgcgctggagcaaaacccaaatagcaagccgctcatggcgcagctgttccttatagtgcagcacagcagggacaacgaggcattcagggatgcgctgctaaacatagtagagcccgagggccgctggctgctcgatttgataaacatcctgcagagcatagtggtgcaggagcgcagcttgagcctggctgacaaggtggccgccatcaactattccatgcttagcctgggcaagttttacgcccgcaagatataccataccccttacgttcccatagacaaggaggtaaagatcgaggggttctacatgcgcatggcgctgaaggtgcttaccttgagcgacgacctgggcgtttatcgcaacgagcgcatccacaaggccgtgagcgtgagccggcggcgcgagctcagcgaccgcgagctgatgcacagcctgcaaagggccctggctggcacgggcagcggcgatagagaggccgagtcctactttgacgcgggcgctgacctgcgctgggccccaagccgacgcgccctggaggcagctggggccggacctgggctggcggtggcacccgcgcgcgctggcaacgtcggcggcgtggaggaatatgacgaggacgatgagtacgagccagaggacggcgagtactaagcggtgatgtttctgatcagatgatgcaagacgcaacggacccggcggtgcgggcggcgctgcagagccagccgtccggccttaactccacggacgactggcgccaggtcatggaccgcatcatgtcgctgactgcgcgcaatcctgacgcgttccggcagcagccgcaggccaaccggctctccgcaattctggaagcggtggtcccggcgcgcgcaaaccccacgcacgagaaggtgctggcgatcgtaaacgcgctggccgaaaacagggccatccggcccgacgaggccggcctggtctacgacgcgctgcttcagcgcgtggctcgttacaacagcggcaacgtgcagaccaacctggaccggctggtgggggatgtgcgcgaggccgtggcgcagcgtgagcgcgcgcagcagcagggcaacctgggctccatggttgcactaaacgccttcctgagtacacagcccgccaacgtgccgcggggacaggaggactacaccaactttgtgagcgcactgcggctaatggtgactgagacaccgcaaagtgaggtgtaccagtctgggccagactattttttccagaccagtagacaaggcctgcagaccgtaaacctgagccaggctttcaaaaacttgcaggggctgtggggggtgcgggctcccacaggcgaccgcgcgaccgtgtctagcttgctgacgcccaactcgcgcctgttgctgctgctaatagcgcccttcacggacagtggcagcgtgtcccgggacacatacctaggtcacttgctgacactgtaccgcgaggccataggtcaggcgcatgtggacgagcatactttccaggagattacaagtgtcagccgcgcgctggggcaggaggacacgggcagcctggaggcaaccctaaactacctgctgaccaaccggcggcagaagatcccctcgttgcacagtttaaacagcgaggaggagcgcattttgcgctacgtgcagcagagcgtgagccttaacctgatgcgcgacggggtaacgcccagcgtggcgctggacatgaccgcgcgcaacatggaaccgggcatgtatgcctcaaaccggccgtttatcaaccgcctaatggactacttgcatcgcgcggccgccgtgaaccccgagtatttcaccaatgccatcttgaacccgcactggctaccgccccctggtttctacaccgggggattcgaggtgcccgagggtaacgatggattcctctgggacgacatagacgacagcgtgttttccccgcaaccgcagaccctgctagagttgcaacagcgcgagcaggcagaggcggcgctgcgaaaggaaagcttccgcaggccaagcagcttgtccgatctaggcgctgcggccccgcggtcagatgctagtagcccatttccaagcttgatagggtctcttaccagcactcgcaccacccgcccgcgcctgctgggcgaggaggagtacctaaacaactcgctgctgcagccgcagcgcgaaaaaaacctgcctccggcatttcccaacaacgggatagagagcctagtggacaagatgagtagatggaagacgtacgcgcaggagcacagggacgtgccaggcccgcgcccgcccacccgtcgtcaaaggcacgaccgtcagcggggtctggtgtgggaggacgatgactcggcagacgacagcagcgtcctggatttgggagggagtggcaacccgtttgcgcaccttcgccccaggctggggagaatgttttaaaaaaaaaaaagcatgatgcaaaataaaaaactcaccaaggccatggcaccgagcgttggttttcttgtattccccttagtatgcggcgcgcggcgatgtatgaggaaggtcctcctccctcctacgagagtgtggtgagcgcggcgccagtggcggcggcgctgggttctcccttcgatgctcccctggacccgccgtttgtgcctccgcggtacctgcggcctaccggggggagaaacagcatccgttactctgagttggcacccctattcgacaccacccgtgtgtacctggtggacaacaagtcaacggatgtggcatccctgaactaccagaacgaccacagcaactttctgaccacggtcattcaaaacaatgactacagcccgggggaggcaagcacacagaccatcaatcttgacgaccggtcgcactggggcggcgacctgaaaaccatcctgcataccaacatgccaaatgtgaacgagttcatgtttaccaataagtttaaggcgcgggtgatggtgtcgcgcttgcctactaaggacaatcaggtggagctgaaatacgagtgggtggagttcacgctgcccgagggcaactactccgagaccatgaccatagaccttatgaacaacgcgatcgtggagcactacttgaaagtgggcagacagaacggggttctggaaagcgacatcggggtaaagtttgacacccgcaacttcagactggggtttgaccccgtcactggtcttgtcatgcctggggtatatacaaacgaagccttccatccagacatcattttgctgccaggatgcggggtggacttcacccacagccgcctgagcaacttgttgggcatccgcaagcggcaacccttccaggagggctttaggatcacctacgatgatctggagggtggtaacattcccgcactgttggatgtggacgcctaccaggcgagcttgaaagatgacaccgaacagggcgggggtggcgcaggcggcagcaacagcagtggcagcggcgcggaagagaactccaacgcggcagccgcggcaatgcagccggtggaggacatgaacgatcatgccattcgcggcgacacctttgccacacgggctgaggagaagcgcgctgaggccgaagcagcggccgaagctgccgcccccgctgcgcaacccgaggtcgagaagcctcagaagaaaccggtgatcaaacccctgacagaggacagcaagaaacgcagttacaacctaataagcaatgacagcaccttcacccagtaccgcagctggtaccttgcatacaactacggcgaccctcagaccggaatccgctcatggaccctgctttgcactcctgacgtaacctgcggctcggagcaggtctactggtcgttgccagacatgatgcaagaccccgtgaccttccgctccacgcgccagatcagcaactttccggtggtgggcgccgagctgttgcccgtgcactccaagagcttctacaacgaccaggccgtctactcccaactcatccgccagtttacctctctgacccacgtgttcaatcgctttcccgagaaccagattttggcgcgcccgccagcccccaccatcaccaccgtcagtgaaaacgttcctgctctcacagatcacgggacgctaccgctgcgcaacagcatcggaggagtccagcgagtgaccattactgacgccagacgccgcacctgcccctacgtttacaaggccctgggcatagtctcgccgcgcgtcctatcgagccgcactttttgagcaagcatgtccatccttatatcgcccagcaataacacaggctggggcctgcgcttcccaagcaagatgtttggcggggccaagaagcgctccgaccaacacccagtgcgcgtgcgcgggcactaccgcgcgccctggggcgcgcacaaacgcggccgcactgggcgcaccaccgtcgatgacgccatcgacgcggtggtggaggaggcgcgcaactacacgcccacgccgccaccagtgtccacagtggacgcggccattcagaccgtggtgcgcggagcccggcgctatgctaaaatgaagagacggcggaggcgcgtagcacgtcgccaccgccgccgacccggcactgccgcccaacgcgcggcggcggccctgcttaaccgcgcacgtcgcaccggccgacgggcggccatgcgggccgctcgaaggctggccgcgggtattgtcactgtgccccccaggtccaggcgacgagcggccgccgcagcagccgcggccattagtgctatgactcagggtcgcaggggcaacgtgtattgggtgcgcgactcggttagcggcctgcgcgtgcccgtgcgcacccgccccccgcgcaactagattgcaagaaaaaactacttagactcgtactgttgtatgtatccagcggcggcggcgcgcaacgaagctatgtccaagcgcaaaatcaaagaagagatgctccaggtcatcgcgccggagatctatggccccccgaagaaggaagagcaggattacaagccccgaaagctaaagcgggtcaaaaagaaaaagaaagatgatgatgatgaacttgacgacgaggtggaactgctgcacgctaccgcgcccaggcgacgggtacagtggaaaggtcgacgcgtaaaacgtgttttgcgacccggcaccaccgtagtctttacgcccggtgagcgctccacccgcacctacaagcgcgtgtatgatgaggtgtacggcgacgaggacctgcttgagcaggccaacgagcgcctcggggagtttgcctacggaaagcggcataaggacatgctggcgttgccgctggacgagggcaacccaacacctagcctaaagcccgtaacactgcagcaggtgctgcccgcgcttgcaccgtccgaagaaaagcgcggcctaaagcgcgagtctggtgacttggcacccaccgtgcagctgatggtacccaagcgccagcgactggaagatgtcttggaaaaaatgaccgtggaacctgggctggagcccgaggtccgcgtgcggccaatcaagcaggtggcgccgggactgggcgtgcagaccgtggacgttcagatacccactaccagtagcaccagtattgccaccgccacagagggcatggagacacaaacgtccccggttgcctcagcggtggcggatgccgcggtgcaggcggtcgctgcggccgcgtccaagacctctacggaggtgcaaacggacccgtggatgtttcgcgtttcagccccccggcgcccgcgccgttcgaggaagtacggcgccgccagcgcgctactgcccgaatatgccctacatccttccattgcgcctacccccggctatcgtggctacacctaccgccccagaagacgagcaactacccgacgccgaaccaccactggaacccgccgccgccgtcgccgtcgccagcccgtgctggccccgatttccgtgcgcagggtggctcgcgaaggaggcaggaccctggtgctgccaacagcgcgctaccaccccagcatcgtttaaaagccggtctttgtggttcttgcagatatggccctcacctgccgcctccgtttcccggtgccgggattccgaggaagaatgcaccgtaggaggggcatggccggccacggcctgacgggcggcatgcgtcgtgcgcaccaccggcggcggcgcgcgtcgcaccgtcgcatgcgcggcggtatcctgcccctccttattccactgatcgccgcggcgattggcgccgtgcccggaattgcatccgtggccttgcaggcgcagagacactgattaaaaacaagttgcatgtggaaaaatcaaaataaaaagtctggactctcacgctcgcttggtcctgtaactattttgtagaatggaagacatcaactttgcgtctctggccccgcgacacggctcgcgcccgttcatgggaaactggcaagatatcggcaccagcaatatgagcggtggcgccttcagctggggctcgctgtggagcggcattaaaaatttcggttccaccgttaagaactatggcagcaaggcctggaacagcagcacaggccagatgctgagggataagttgaaagagcaaaatttccaacaaaaggtggtagatggcctggcctctggcattagcggggtggtggacctggccaaccaggcagtgcaaaataagattaacagtaagcttgatccccgccctcccgtagaggagcctccaccggccgtggagacagtgtctccagaggggcgtggcgaaaagcgtccgcgccccgacagggaagaaactctggtgacgcaaatagacgagcctccctcgtacgaggaggcactaaagcaaggcctgcccaccacccgtcccatcgcgcccatggctaccggagtgctgggccagcacacacccgtaacgctggacctgcctccccccgccgacacccagcagaaacctgtgctgccaggcccgaccgccgttgttgtaacccgtcctagccgcgcgtccctgcgccgcgccgccagcggtccgcgatcgttgcggcccgtagccagtggcaactggcaaagcacactgaacagcatcgtgggtctgggggtgcaatccctgaagcgccgacgatgcttctgatagctaacgtgtcgtatgtgtgtcatgtatgcgtccatgtcgccgccagaggagctgctgagccgccgcgcgcccgctttccaagatggctaccccttcgatgatgccgcagtggtcttacatgcacatctcgggccaggacgcctcggagtacctgagccccgggctggtgcagtttgcccgcgccaccgagacgtacttcagcctgaataacaagtttagaaaccccacggtggcgcctacgcacgacgtgaccacagaccggtcccagcgtttgacgctgcggttcatccctgtggaccgtgaggatactgcgtactcgtacaaggcgcggttcaccctagctgtgggtgataaccgtgtgctggacatggcttccacgtactttgacatccgcggcgtgctggacaggggccctacttttaagccctactctggcactgcctacaacgccctggctcccaagggtgccccaaatccttgcgaatgggatgaagctgctactgctcttgaaataaacctagaagaagaggacgatgacaacgaagacgaagtagacgagcaagctgagcagcaaaaaactcacgtatttgggcaggcgccttattctggtataaatattacaaaggagggtattcaaataggtgtcgaaggtcaaacacctaaatatgccgataaaacatttcaacctgaacctcaaataggagaatctcagtggtacgaaacagaaattaatcatgcagctgggagagtcctaaaaaagactaccccaatgaaaccatgttacggttcatatgcaaaacccacaaatgaaaatggagggcaaggcattcttgtaaagcaacaaaatggaaagctagaaagtcaagtggaaatgcaatttttctcaactactgaggcagccgcaggcaatggtgataacttgactcctaaagtggtattgtacagtgaagatgtagatatagaaaccccagacactcatatttcttacatgcccactattaaggaaggtaactcacgagaactaatgggccaacaatctatgcccaacaggcctaattacattgcttttagggacaattttattggtctaatgtattacaacagcacgggtaatatgggtgttctggcgggccaagcatcgcagttgaatgctgttgtagatttgcaagacagaaacacagagctttcataccagcttttgcttgattccattggtgatagaaccaggtacttttctatgtggaatcaggctgttgacagctatgatccagatgttagaattattgaaaatcatggaactgaagatgaacttccaaattactgctttccactgggaggtgtgattaatacagagactcttaccaaggtaaaacctaaaacaggtcaggaaaatggatgggaaaaagatgctacagaattttcagataaaaatgaaataagagttggaaataattttgccatggaaatcaatctaaatgccaacctgtggagaaatttcctgtactccaacatagcgctgtatttgcccgacaagctaaagtacagtccttccaacgtaaaaatttctgataacccaaacacctacgactacatgaacaagcgagtggtggctcccgggctagtggactgctacattaaccttggagcacgctggtcccttgactatatggacaacgtcaacccatttaaccaccaccgcaatgctggcctgcgctaccgctcaatgttgctgggcaatggtcgctatgtgcccttccacatccaggtgcctcagaagttctttgccattaaaaacctccttctcctgccgggctcatacacctacgagtggaacttcaggaaggatgttaacatggttctgcagagctccctaggaaatgacctaagggttgacggagccagcattaagtttgatagcatttgcctttacgccaccttcttccccatggcccacaacaccgcctccacgcttgaggccatgcttagaaacgacaccaacgaccagtcctttaacgactatctctccgccgccaacatgctctaccctatacccgccaacgctaccaacgtgcccatatccatcccctcccgcaactgggcggctttccgcggctgggccttcacgcgccttaagactaaggaaaccccatcactgggctcgggctacgacccttattacacctactctggctctataccctacctagatggaaccttttacctcaaccacacctttaagaaggtggccattacctttgactcttctgtcagctggcctggcaatgaccgcctgcttacccccaacgagtttgaaattaagcgctcagttgacggggagggttacaacgttgcccagtgtaacatgaccaaagactggttcctggtacaaatgctagctaactataacattggctaccagggcttctatatcccagagagctacaaggaccgcatgtactccttctttagaaacttccagcccatgagccgtcaggtggtggatgatactaaatacaaggactaccaacaggtgggcatcctacaccaacacaacaactctggatttgttggctaccttgcccccaccatgcgcgaaggacaggcctaccctgctaacttcccctatccgcttataggcaagaccgcagttgacagcattacccagaaaaagtttctttgcgatcgcaccctttggcgcatcccattctccagtaactttatgtccatgggcgcactcacagacctgggccaaaaccttctctacgccaactccgcccacgcgctagacatgacttttgaggtggatcccatggacgagcccacccttctttatgttttgtttgaagtctttgacgtggtccgtgtgcaccagccgcaccgcggcgtcatcgaaaccgtgtacctgcgcacgcccttctcggccggcaacgccacaacataaagaagcaagcaacatcaacaacagctgccgccatgggctccagtgagcaggaactgaaagccattgtcaaagatcttggttgtgggccatattttttgggcacctatgacaagcgctttccaggctttgtttctccacacaagctcgcctgcgccatagtcaatacggccggtcgcgagactgggggcgtacactggatggcctttgcctggaacccgcactcaaaaacatgctacctctttgagccctttggcttttctgaccagcgactcaagcaggtttaccagtttgagtacgagtcactcctgcgccgtagcgccattgcttcttcccccgaccgctgtataacgctggaaaagtccacccaaagcgtacaggggcccaactcggccgcctgtggactattctgctgcatgtttctccacgcctttgccaactggccccaaactcccatggatcacaaccccaccatgaaccttattaccggggtacccaactccatgctcaacagtccccaggtacagcccaccctgcgtcgcaaccaggaacagctctacagcttcctggagcgccactcgccctacttccgcagccacagtgcgcagattaggagcgccacttctttttgtcacttgaaaaacatgtaaaaataatgtactagagacactttcaataaaggcaaatgcttttatttgtacactctcgggtgattatttacccccacccttgccgtctgcgccgtttaaaaatcaaaggggttctgccgcgcatcgctatgcgccactggcagggacacgttgcgatactggtgtttagtgctccacttaaactcaggcacaaccatccgcggcagctcggtgaagttttcactccacaggctgcgcaccatcaccaacgcgtttagcaggtcgggcgccgatatcttgaagtcgcagttggggcctccgccctgcgcgcgcgagttgcgatacacagggttgcagcactggaacactatcagcgccgggtggtgcacgctggccagcacgctcttgtcggagatcagatccgcgtccaggtcctccgcgttgctcagggcgaacggagtcaactttggtagctgccttcccaaaaagggcgcgtgcccaggctttgagttgcactcgcaccgtagtggcatcaaaaggtgaccgtgcccggtctgggcgttaggatacagcgcctgcataaaagccttgatctgcttaaaagccacctgagcctttgcgccttcagagaagaacatgccgcaagacttgccggaaaactgattggccggacaggccgcgtcgtgcacgcagcaccttgcgtcggtgttggagatctgcaccacatttcggccccaccggttcttcacgatcttggccttgctagactgctccttcagcgcgcgctgcccgttttcgctcgtcacatccatttcaatcacgtgctccttatttatcataatgcttccgtgtagacacttaagctcgccttcgatctcagcgcagcggtgcagccacaacgcgcagcccgtgggctcgtgatgcttgtaggtcacctctgcaaacgactgcaggtacgcctgcaggaatcgccccatcatcgtcacaaaggtcttgttgctggtgaaggtcagctgcaacccgcggtgctcctcgttcagccaggtcttgcatacggccgccagagcttccacttggtcaggcagtagtttgaagttcgcctttagatcgttatccacgtggtacttgtccatcagcgcgcgcgcagcctccatgcccttctcccacgcagacacgatcggcacactcagcgggttcatcaccgtaatttcactttccgcttcgctgggctcttcctcttcctcttgcgtccgcataccacgcgccactgggtcgtcttcattcagccgccgcactgtgcgcttacctcctttgccatgcttgattagcaccggtgggttgctgaaacccaccatttgtagcgccacatcttctctttcttcctcgctgtccacgattacctctggtgatggcgggcgctcgggcttgggagaagggcgcttctttttcttcttgggcgcaatggccaaatccgccgccgaggtcgatggccgcgggctgggtgtgcgcggcaccagcgcgtcttgtgatgagtcttcctcgtcctcggactcgatacgccgcctcatccgcttttttgggggcgcccggggaggcggcggcgacggggacggggacgacacgtcctccatggttgggggacgtcgcgccgcaccgcgtccgcgctcgggggtggtttcgcgctgctcctcttcccgactggccatttccttctcctataggcagaaaaagatcatggagtcagtcgagaagaaggacagcctaaccgccccctctgagttcgccaccaccgcctccaccgatgccgccaacgcgcctaccaccttccccgtcgaggcacccccgcttgaggaggaggaagtgattatcgagcaggacccaggttttgtaagcgaagacgacgaggaccgctcagtaccaacagaggataaaaagcaagaccaggacaacgcagaggcaaacgaggaacaagtcgggcggggggacgaaaggcatggcgactacctagatgtgggagacgacgtgctgttgaagcatctgcagcgccagtgcgccattatctgcgacgcgttgcaagagcgcagcgatgtgcccctcgccatagcggatgtcagccttgcctacgaacgccacctattctcaccgcgcgtaccccccaaacgccaagaaaacggcacatgcgagcccaacccgcgcctcaacttctaccccgtatttgccgtgccagaggtgcttgccacctatcacatctttttccaaaactgcaagatacccctatcctgccgtgccaaccgcagccgagcggacaagcagctggccttgcggcagggcgctgtcatacctgatatcgcctcgctcaacgaagtgccaaaaatctttgagggtcttggacgcgacgagaagcgcgcggcaaacgctctgcaacaggaaaacagcgaaaatgaaagtcactctggagtgttggtggaactcgagggtgacaacgcgcgcctagccgtactaaaacgcagcatcgaggtcacccactttgcctacccggcacttaacctaccccccaaggtcatgagcacagtcatgagtgagctgatcgtgcgccgtgcgcagcccctggagagggatgcaaatttgcaagaacaaacagaggagggcctacccgcagttggcgacgagcagctagcgcgctggcttcaaacgcgcgagcctgccgacttggaggagcgacgcaaactaatgatggccgcagtgctcgttaccgtggagcttgagtgcatgcagcggttctttgctgacccggagatgcagcgcaagctagaggaaacattgcactacacctttcgacagggctacgtacgccaggcctgcaagatctccaacgtggagctctgcaacctggtctcctaccttggaattttgcacgaaaaccgccttgggcaaaacgtgcttcattccacgctcaagggcgaggcgcgccgcgactacgtccgcgactgcgtttacttatttctatgctacacctggcagacggccatgggcgtttggcagcagtgcttggaggagtgcaacctcaaggagctgcagaaactgctaaagcaaaacttgaaggacctatggacggccttcaacgagcgctccgtggccgcgcacctggcggacatcattttccccgaacgcctgcttaaaaccctgcaacagggtctgccagacttcaccagtcaaagcatgttgcagaactttaggaactttatcctagagcgctcaggaatcttgcccgccacctgctgtgcacttcctagcgactttgtgcccattaagtaccgcgaatgccctccgccgctttggggccactgctaccttctgcagctagccaactaccttgcctaccactctgacataatggaagacgtgagcggtgacggtctactggagtgtcactgtcgctgcaacctatgcaccccgcaccgctccctggtttgcaattcgcagctgcttaacgaaagtcaaattatcggtacctttgagctgcagggtccctcgcctgacgaaaagtccgcggctccggggttgaaactcactccggggctgtggacgtcggcttaccttcgcaaatttgtacctgaggactaccacgcccacgagattaggttctacgaagaccaatcccgcccgcctaatgcggagcttaccgcctgcgtcattacccagggccacattcttggccaattgcaagccatcaacaaagcccgccaagagtttctgctacgaaagggacggggggtttacttggacccccagtccggcgaggagctcaacccaatccccccgccgccgcagccctatcagcagcagccgcgggcccttgcttcccaggatggcacccaaaaagaagctgcagctgccgccgccacccacggacgaggaggaatactgggacagtcaggcagaggaggttttggacgaggaggaggaggacatgatggaagactgggagagcctagacgaggaagcttccgaggtcgaagaggtgtcagacgaaacaccgtcaccctcggtcgcattcccctcgccggcgccccagaaatcggcaaccggttccagcatggctacaacctccgctcctcaggcgccgccggcactgcccgttcgccgacccaaccgtagatgggacaccactggaaccagggccggtaagtccaagcagccgccgccgttagcccaagagcaacaacagcgccaaggctaccgctcatggcgcgggcacaagaacgccatagttgcttgcttgcaagactgtgggggcaacatctccttcgcccgccgctttcttctctaccatcacggcgtggccttcccccgtaacatcctgcattactaccgtcatctctacagcccatactgcaccggcggcagcggcagcaacagcagcggccacacagaagcaaaggcgaccggatagcaagactctgacaaagcccaagaaatccacagcggcggcagcagcaggaggaggagcgctgcgtctggcgcccaacgaacccgtatcgacccgcgagcttagaaacaggatttttcccactctgtatgctatatttcaacagagcaggggccaagaacaagagctgaaaataaaaaacaggtctctgcgatccctcacccgcagctgcctgtatcacaaaagcgaagatcagcttcggcgcacgctggaagacgcggaggctctcttcagtaaatactgcgcgctgactcttaaggactagtttcgcgccctttctcaaatttaagcgcgaaaactacgtcatctccagcggccacacccggcgccagcacctgttgtcagcgccattatgagcaaggaaattcccacgccctacatgtggagttaccagccacaaatgggacttgcggctggagctgcccaagactactcaacccgaataaactacatgagcgcgggaccccacatgatatcccgggtcaacggaatacgcgcccaccgaaaccgaattctcctggaacaggcggctattaccaccacacctcgtaataaccttaatccccgtagttggcccgctgccctggtgtaccaggaaagtcccgctcccaccactgtggtacttcccagagacgcccaggccgaagttcagatgactaactcaggggcgcagcttgcgggcggctttcgtcacagggtgcggtcgcccgggcagggtataactcacctgacaatcagagggcgaggtattcagctcaacgacgagtcggtgagctcctcgcttggtctccgtccggacgggacatttcagatcggcggcgccggccgctcttcattcacgcctcgtcaggcaatcctaactctgcagacctcgtcctctgagccgcgctctggaggcattggaactctgcaatttattgaggagtttgtgccatcggtctactttaaccccttctcgggacctcccggccactatccggatcaatttattcctaactttgacgcggtaaaggactcggcggacggctacgactgaatgttaagtggagaggcagagcaactgcgcctgaaacacctggtccactgtcgccgccacaagtgctttgcccgcgactccggtgagttttgctactttgaattgcccgaggatcatatcgagggcccggcgcacggcgtccggcttaccgcccagggagagcttgcccgtagcctgattcgggagtttacccagcgccccctgctagttgagcgggacaggggaccctgtgttctcactgtgatttgcaactgtcctaaccctggattacatcaagatcctctagttaatgtcaggtcgcctaagtcgattaactagagtacccggggatcttattccctttaactaataaaaaaaaataataaagcatcacttacttaaaatcagttagcaaatttctgtccagtttattcagcagcacctccttgccctcctcccagctctggtattgcagcttcctcctggctgcaaactttctccacaatctaaatggaatgtcagtttcctcctgttcctgtccatccgcacccactatcttcatgttgttgcagatgaagcgcgcaagaccgtctgaagataccttcaaccccgtgtatccatatgacacggaaaccggtcctccaactgtgccttttcttactcctccctttgtatcccccaatgggtttcaagagagtccccctggggtactctctttgcgcctatccgaacctctagttacctccaatggcatgcttgcgctcaaaatgggcaacggcctctctctggacgaggccggcaaccttacctcccaaaatgtaaccactgtgagcccacctctcaaaaaaaccaagtcaaacataaacctggaaatatctgcacccctcacagttacctcagaagccctaactgtggctgccgccgcacctctaatggtcgcgggcaacacactcaccatgcaatcacaggccccgctaaccgtgcacgactccaaacttagcattgccacccaaggacccctcacagtgtcagaaggaaagctagccctgcaaacatcaggccccctcaccaccaccgatagcagtacccttactatcactgcctcaccccctctaactactgccactggtagcttgggcattgacttgaaagagcccatttatacacaaaatggaaaactaggactaaagtacggggctcctttgcatgtaacagacgacctaaacactttgaccgtagcaactggtccaggtgtgactattaataatacttccttgcaaactaaagttactggagccttgggttttgattcacaaggcaatatgcaacttaatgtagcaggaggactaaggattgattctcaaaacagacgccttatacttgatgttagttatccgtttgatgctcaaaaccaactaaatctaagactaggacagggccctctttttataaactcagcccacaacttggatattaactacaacaaaggcctttacttgtttacagcttcaaacaattccaaaaagcttgaggttaacctaagcactgccaaggggttgatgtttgacgctacagccatagccattaatgcaggagatgggcttgaatttggttcacctaatgcaccaaacacaaatcccctcaaaacaaaaattggccatggcctagaatttgattcaaacaaggctatggttcctaaactaggaactggccttagttttgacagcacaggtgccattacagtaggaaacaaaaataatgataagctaactttgtggaccggaataaaccctccacctaactgtcaaattgtggaaaacactaatacaaatgatggcaaacttactttagtattagtaaaaaatggagggcttgttaatggctacgtgtctctagttggtgtatcagacactgtgaaccaaatgttcacacaaaagacagcaaacatccaattaagattatattttgactcttctggaaatctattaactgaggaatcagacttaaaaattccacttaaaaataaatcttctacagcgaccagtgaaactgtagccagcagcaaagcctttatgccaagtactacagcttatcccttcaacaccactactagggatagtgaaaactacattcatggaatatgttactacatgactagttatgatagaagtctatttcccttgaacatttctataatgctaaacagccgtatgatttcttccaatgttgcctatgccatacaatttgaatggaatctaaatgcaagtgaatctccagaaagcaacatagctacgctgaccacatccccctttttcttttcttacattacagaagacgacaactaaagaatcgtttgtgttatgtttcaacgtgtttatttttcaattgcagaaaatttcaagtcatttttcattcagtagtatagccccaccaccacatagcttatacagatcaccgtaccttaatcaaactcacagaaccctagtattcaacctgccacctccctcccaacacacagagtacacagtcctttctccccggctggccttaaaaagcatcatatcatgggtaacagacatattcttaggtgttatattccacacggtttcctgtcgagccaaacgctcatcagtgatattaataaactccccgggcagctcacttaagttcatgtcgctgtccagctgctgagccacaggctgctgtccaacttgcggttgcttaacgggcggcgaaggagaagtccacgcctacatgggggtagagtcataatcgtgcatcaggatagggcggtggtgctgcagcagcgcgcgaataaactgctgccgccgccgctccgtcctgcaggaatacaacatggcagtggtctcctcagcgatgattcgcaccgcccgcagcataaggcgccttgtcctccgggcacagcagcgcaccctgatctcacttaaatcagcacagtaactgcagcacagcaccacaatattgttcaaaatcccacagtgcaaggcgctgtatccaaagctcatggcggggaccacagaacccacgtggccatcataccacaagcgcaggtagattaagtggcgacccctcataaacacgctggacataaacattacctcttttggcatgttgtaattcaccacctcccctctgattaaacatggcgccatccaccaccatcctaaaccagctggccaaaacctgcccgccggctatacactgcagggaaccgggactggaacaatgacagtggagagcccaggactcgtaaccatggatcatcatgctcgtcatgatatcaatgttggcacaacacaggcacacgtgcatacacttcctcaggattacaagctcctcccgcgttagaaccatatcccagggaacaacccattcctgaatcagcgtaaatcccacactgcagggaagacctcgcacgtaactcacgttgtgcattgtcaaagtgttacattcgggcagcagcggatgatcctccagtatggtagcgcgggtttctgtctcaaaaggaggtagacgatccctactgtacggagtgcgccgagacaaccgagatcgtgttggtcgtagtgtcatgccaaatggaacgccggacgtagtcatatttcctgaagcaaaaccaggtgcgggcgtgacaaacagatctgcgtctccggtctcgccgcttagatcgctctgtgtagtagttgtagtatatccactctctcaaagcatccaggcgccccctggcttcgggttctatgtaaactccttcatgcgccgctgccctgataacatccaccaccgcagaataagccacacccagccaacctacacattcgttctgcgagtcacacacgggaggagcgggaagagctggaagaaccatgtttttttttttattccaaaagattatccaaaacctcaaaatgaagatctattaagtgaacgcgctcccctccggtggcgtggtcaaactctacagccaaagaacagataatggcatttgtaagatgttgcacaatggcttccaaaaggcaaacggccctcacgtccaagtggacgtaaaggctaaacccttcagggtgaatctcctctataaacattccagcaccttcaaccatgcccaaataattctcatctcgccaccttctcaatatatctctaagcaaatcccgaatattaagtccggccattgtaaaaatctgctccagagcgccctccaccttcagcctcaagcagcgaatcatgattgcaaaaattcaggttcctcacagacctgtataagattcaaaagcggaacattaacaaaaataccgcgatcccgtaggtcccttcgcagggccagctgaacataatcgtgcaggtctgcacggaccagcgcggccacttccccgccaggaaccatgacaaaagaacccacactgattatgacacgcatactcggagctatgctaaccagcgtagccccgatgtaagcttgttgcatgggcggcgatataaaatgcaaggtgctgctcaaaaaatcaggcaaagcctcgcgcaaaaaagaaagcacatcgtagtcatgctcatgcagataaaggcaggtaagctccggaaccaccacagaaaaagacaccatttttctctcaaacatgtctgcgggtttctgcataaacacaaaataaaataacaaaaaaacatttaaacattagaagcctgtcttacaacaggaaaaacaacccttataagcataagacggactacggccatgccggcgtgaccgtaaaaaaactggtcaccgtgattaaaaagcaccaccgacagctcctcggtcatgtccggagtcataatgtaagactcggtaaacacatcaggttgattcacatcggtcagtgctaaaaagcgaccgaaatagcccgggggaatacatacccgcaggcgtagagacaacattacagcccccataggaggtataacaaaattaataggagagaaaaacacataaacacctgaaaaaccctcctgcctaggcaaaatagcaccctcccgctccagaacaacatacagcgcttccacagcggcagccataacagtcagccttaccagtaaaaaagaaaacctattaaaaaaacaccactcgacacggcaccagctcaatcagtcacagtgtaaaaaagggccaagtgcagagcgagtatatataggactaaaaaatgacgtaacggttaaagtccacaaaaaacacccagaaaaccgcacgcgaacctacgcccagaaacgaaagccaaaaaacccacaacttcctcaaatcgtcacttccgttttcccacgttacgtcacttcccattttaagaaaactacaattcccaacacatacaagttactccgccctaaaacctacgtcacccgccccgttcccacgccccgcgccacgtcacaaactccaccccctcattatcatattggcttcaatccaaaataaggtatattattgatgatg

SEQ ID NO: 28 - DNA, 36401 bp, Artificial Sequence
  pAdk35RF-Spike/E4orf6(-1kb)-E4dl355(E4re#23)
ttaattaacatcatcaataatataccttattttggattgaagccaatatgataatgagggggtggagtttgtgacgtggcgcggggcgtgggaacggggcgggtgacgtagtagtgtggcggaagtgtgatgttgcaagtgtggcggaacacatgtaagcgacggatgtggcaaaagtgacgtttttggtgtgcgccggtgtacacaggaagtgacaattttcgcgcggttttaggcggatgttgtagtaaatttgggcgtaaccgagtaagatttggccattttcgcgggaaaactgaataagaggaagtgaaatctgaataattttgtgttactcatagcgcgtaataatttgatccgcgttaagatacattgatgagtttggacaaaccacaactagaatgcagtgaaaaaaatgctttatttgtgaaatttgtgatgctattgctttatttgtaaccattataagctgcaataaacaagttaacaacaacaattgcattcattttatgtttcaggttcagggggaggtgtgggaggttttttaaagcaagtaaaacctctacaaatgtggtatggctgattatgatcaattttcatggccacttgatgtattgttcatatttgcccagttcttggaggtcaatcagggactcattcaggttcttagccacctcattcagtctgtcaatctccttctggatgttcaccacagaggcattgatgccagagatgtctcccaggtccacatcagggctggtgtggttcttgaagtatttgtccagttcctccttgaaggagtccagttcaggttggagtgggtcatagactgtgttgttcacaatgccaatcaccacatcacagttgccagacacaaaggtgttgtctgtggtgataatctgtggttcatagaagttcctctgggtcacaaaccagtgggtgccattgctcacaaacactccctcccttggaaagtgagccttgccatcatggcagatggcaggggctgtggtgaagttcttctcctgggcaggcacataggtcacatgcaggaacaccactccatgaggggcagactgtggaaaactcatcaggtggtagcccttgccacagaagtccaccctcttgctttgtcccagcacacactcactcatcttggtggcagccaggttggcagatgccctaatctcagcagccctgataagttgttgggtcacataggtttggagggattggagtctgcctgtaatcagtctgtcaatctggacctcagcctccaccttgtccagtctgctcaggatgtcattcagcacagaggagatggctccaaagttgctggaaagttgcttcaccagggtgttcagagcctgggcattctggttcaccacatcttggagtttgcccagggcagaggctgtgctggacagggagtcctgaatcttgccaatggcagagttgaactggttggcaatcagtttctggttctcatagagcacattctgggtcactccaatgccattgaacctgtaagccatctgcatagcaaatgggatttggagggctgctcctgctccaaaggtccagccagaggtgatggtgccagccagcagggcagaggtgtattgggcaatcatctcatctgtcagcagtggaggcagcactgtcagtccattgaacttctgggcacaaatcaggtccctggcagcaatgtctcccagacagtctccatattgcttgatgaagccagcatcagccagggtcaccttgttgaacagcaggtcctcaatgaaggacctcttgcttggcttgcttgggtcaggcagaatctggctgaagttgaagcctccaaagtccttgattggaggtgtcttgtaaatctgcttcacctgggcaaacacctcctgggtgttcttgtcctgttccacagcaatgcctgtcagagccctgttaagttgggtacagaaggagccatattggagcagcaggttgctacactctgtgctgtctccacagatatacattgtacagtccacagaggtcttggtcatactcacaggcagaatctctgtggtcacagagatggtgaagttggttgggatggcaatgctgttgttgctgtaagccacagagttctctgctcccagactcattgtgtaggcaatgatgctctggcttgccacagacctcgacccaccgccaccggtctgggtctggtaggaggcacagatgcctgctccaattgggatgtcacactcataggagttgttcacatgctctgctccaatcagacagccagccctggtctggaacacattgctgcctgtgctgtagaccctccaggttggtgtaagttggtcagcatggatagccacaggcacctcagtacagttcacatcctggtagagcacagccacctggttgctggtgttggtgccaggtgtaatcacagacactcctccaaaggaacatggtgtgatgtccagaatctccaaggtctgtgggtccctcacagcatctgtggtgtcagcaatgtccctgccaaactgttggaatggcaggaacttcttgttgctctctgtcagcactcctgtgcctgtcagtccattgaagttgaagttcacacacttgttcttcaccaggttggtgctcttctttggtccacacactgtggcaggggcatggagcagttcaaaggacagcaccaccaccctgtatggttggtagcccactccattggttggttggaagccataggattggagtggaaagtaacagttgaagccctccactccattacatggtgtgctgccagcctggtaaatctctgtgctgatgtccctctcaaatggtttcaggttgctcttcctgaacagtctgtagaggtagttgtagttgcctcccaccttgctgtccaggttgttgctgttccaggcaatcacacagcctgtgaagtcatcaggcagtttgtagttgtagtcagcaatcttgcctgtttgtccaggggcaatctgtctcacctcatctcccctaatcacaaaggagtcagcatagacattggtgaaacacaggtcattcagtttggttgggctcactccataacacttgaaggtgctgaaggaggcagagttgtagagcacagagtagtcagccacacagttgctaatcctcttcctgttccaggcatagacagaggcaaacctggtggcattgaacacctctccaaatggacacaggttggtgatgtttggaaacctcacaatgctctctgttggttggaccctgaagttgctggtctggtagatgcccttctccactgtgaaggatttcagggtacacttggtctcagacagtgggtccagggcacagtccacagcatctgtgatggtgccattctcattgtatttcagcaggaaggtccttggttggaggtagcccacatagtaggctgctgctcctgctgtccagccagaggaggagtctccaggtgtcaggtaggacctgtgcagagccagcagggtctggaacctggtgatgttgatgccaattggcaggtccaccagtggttccaaggcagagaagccctgtggcaggtccctcaccaggttgattggtgtgtgtttgctgtaaatcttgaagtagccatcaatgttcttgaacacaaactccctcaggttcttgaagttgccctgcttgccctccaagtccatcaggaatggttggctcacatattcaaaggtacagttgttggcagaggagtagaccctgaactcagactccatccaggacttgttgttcttgtggtagtagactcccaggaatgggtcattacagaactggaactcacacaccttaatcaccacattggtggcattgttcacaatcagcagggactgggtcttgctgtccagggtggtgccaaaaatccagcccctgatgatgttgctcttctctgtgctggcaaagtagactccatcattgaatggcagcacagggttgtcaaacctcttggtgccattggtgccagacacatggatggcatggaaccaggtcacattgctgaagaatggcaggaacaggtcctgggtgctgtgcagcacagaggacctgaacaccttgtcagggtagtagactcccctggtgaaggagttggtgtaggcaggaggaagttgggtcctggtggtcaggttcacacactggctggacaccagtggcagcagcaccaggaacacaaacatggtggcaaatcggaggctggatcggtcccggtgtcttctatggaggtcaaaacagcgtggatggcgtctccaggcgatctgacggttcactaaacgagctcgtcgacgatctctatcactgatagggagatctctatcactgatagggagagctctgcttatatagacctcccaccgtacacgcctaccgcccatttgcgtcaatggggcggagttgttacgacattttggaaagtcccgttgattttggtgccaaaacaaactcccattgacgtcaatggggtggagacttggaaatccccgtgagtcaaaccgctatccacgcccattgatgtactgccaaaaccgcatcaccatggtaatagcgatgactaatacgtagatgtactgccaagtaggaaagtcccataaggtcatgtactgggcataatgccaggcgggccatttaccgtcattgacgtcaatagggggcgtacttggcatatgatacacttgatgtactgccaagtgggcagtttaccgtaaatactccacccattgacgtcaatggaaagtccctattggcgttactatgggaacatacgtcattattgacgtcaatgggcgggggtcgttgggcggtcagccaggcgggccatttaccgtaagttatgtaacgcggaactccatatatgggctatgaactaatgaccccgtaattgattactattacagatggttgaaggtgctggaatgtttatagaggagattcaccctgaagggtttagcctttacgtccacttggacgtgagggccgtttgccttttggaagccattgtgcaacatcttacaaatgccattatctgttctttggctgtagagtttgaccacgccaccggaggggagcgcgttcacttaatagatcttcattttgaggttttggataatcttttggaataaaaaaaaaaacatggttcttccagctcttcccgctcctcccgtgtgtgactcgcagaacgaatgtgtaggttggctgggtgtggcttattctgcggtggtggatgttatcagggcagcggcgcatgaaggagtttacatagaacccgaagccagggggcgcctggatgctttgagagagtggatatactacaactactacacagagcgatctaagcggcgagaccggagacgcagatctgtttgtcacgcccgcacctggttttgcttcaggaaatatgactacgtccggcgttccatttggcatgacactacgaccaacacgatctcggttgtctcggcgcactccgtacagtagggatcgtctacctccttttgagacagaaacccgcgctaccatactggaggatcatccgctgctgcccgaatgtaacactttgacaatgcacaacgtgagttacgtgcgaggtcttccctgcagtgtgggatttacgctgattcaggaatgggttgttccctgggatatggttctaacgcgggaggagcttgtaatcctgaggaagtgtatgcacgtgtgcctgtgttgtgccaacattgatatcatgacgagcatgatgatccatggttacgagtcctgggctctccactgtcattgttccagtcccggttccctgcagtgtatagccggcgggcaggttttggccagctggtttaggatggtggtggatggcgccatgtttaatcagaggtttatatggtaccgggaggtggtgaattacaacatgccaaaagaggtaatgtttatgtccagcgtgtttatgaggggtcgccacttaatctacctgcgcttgtggtatgatggccacgtgggttctgtggtccccgccatgagctttggatacagcgccttgcactgtgggattttgaacaatattgtggtgctgtgctgcagttactgtgctgatttaagtgagatcagggtgcgctgctgtgcccggaggacaaggcgccttatgctgcgggcggtgcgaatcatcgctgaggagaccactgccatgttgtattcctgcaggacggagcggcggcggcagcagtttattcgcgcgctgctgcagcaccaccgccctatcctgatgcacgattatgactctacccccatgtagaagcttggggatcaattctctagagctcgctgatcagcctcgactgtgccttctagttgccagccatctgttgtttgcccctcccccgtgccttccttgaccctggaaggtgccactcccactgtcctttcctaataaaatgaggaaattgcatcgcattgtctgagtaggtgtcattctattctggggggtggggtggggcaggacagcaagggggaggattgggaagacaatagcaggcatgctggggatgcggtgggctctatggcttctgaggaaattgggcgtggcttaagggtgggaaagaatatataaggtgggggtcttatgtagttttgtatctgttttgcagcagccgccgccgccatgagcaccaactcgtttgatggaagcattgtgagctcatatttgacaacgcgcatgcccccatgggccggggtgcgtcagaatgtgatgggctccagcattgatggtcgccccgtcctgcccgcaaactctactaccttgacctacgagaccgtgtctggaacgccgttggagactgcagcctccgccgccgcttcagccgctgcagccaccgcccgcgggattgtgactgactttgctttcctgagcccgcttgcaagcagtgcagcttcccgttcatccgcccgcgatgacaagttgacggctcttttggcacaattggattctttgacccgggaacttaatgtcgtttctcagcagctgttggatctgcgccagcaggtttctgccctgaaggcttcctcccctcccaatgcggtttaaaacataaataaaaaaccagactctgtttggatttggatcaagcaagtgtcttgctgtctttatttaggggttttgcgcgcgcggtaggcccgggaccagcggtctcggtcgttgagggtcctgtgtattttttccaggacgtggtaaaggtgactctggatgttcagatacatgggcataagcccgtctctggggtggaggtagcaccactgcagagcttcatgctgcggggtggtgttgtagatgatccagtcgtagcaggagcgctgggcgtggtgcctaaaaatgtctttcagtagcaagctgattgccaggggcaggcccttggtgtaagtgtttacaaagcggttaagctgggatgggtgcatacgtggggatatgagatgcatcttggactgtatttttaggttggctatgttcccagccatatccctccggggattcatgttgtgcagaaccaccagcacagtgtatccggtgcacttgggaaatttgtcatgtagcttagaaggaaatgcgtggaagaacttggagacgcccttgtgacctccaagattttccatgcattcgtccataatgatggcaatgggcccacgggcggcggcctgggcgaagatatttctgggatcactaacgtcatagttgtgttccaggatgagatcgtcataggccatttttacaaagcgcgggcggagggtgccagactgcggtataatggttccatccggcccaggggcgtagttaccctcacagatttgcatttcccacgctttgagttcagatggggggatcatgtctacctgcggggcgatgaagaaaacggtttccggggtaggggagatcagctgggaagaaagcaggttcctgagcagctgcgacttaccgcagccggtgggcccgtaaatcacacctattaccgggtgcaactggtagttaagagagctgcagctgccgtcatccctgagcaggggggccacttcgttaagcatgtccctgactcgcatgttttccctgaccaaatccgccagaaggcgctcgccgcccagcgatagcagttcttgcaaggaagcaaagtttttcaacggtttgagaccgtccgccgtaggcatgcttttgagcgtttgaccaagcagttccaggcggtcccacagctcggtcacctgctctacggcatctcgatccagcatatctcctcgtttcgcgggttggggcggctttcgctgtacggcagtagtcggtgctcgtccagacgggccagggtcatgtctttccacgggcgcagggtcctcgtcagcgtagtctgggtcacggtgaaggggtgcgctccgggctgcgcgctggccagggtgcgcttgaggctggtcctgctggtgctgaagcgctgccggtcttcgccctgcgcgtcggccaggtagcatttgaccatggtgtcatagtccagcccctccgcggcgtggcccttggcgcgcagcttgcccttggaggaggcgccgcacgaggggcagtgcagacttttgagggcgtagagcttgggcgcgagaaataccgattccggggagtaggcatccgcgccgcaggccccgcagacggtctcgcattccacgagccaggtgagctctggccgttcggggtcaaaaaccaggtttcccccatgctttttgatgcgtttcttacctctggtttccatgagccggtgtccacgctcggtgacgaaaaggctgtccgtgtccccgtatacagacttgagaggcctgtcctcgagcggtgttccgcggtcctcctcgtatagaaactcggaccactctgagacaaaggctcgcgtccaggccagcacgaaggaggctaagtgggaggggtagcggtcgttgtccactagggggtccactcgctccagggtgtgaagacacatgtcgccctcttcggcatcaaggaaggtgattggtttgtaggtgtaggccacgtgaccgggtgttcctgaaggggggctataaaagggggtgggggcgcgttcgtcctcactctcttccgcatcgctgtctgcgagggccagctgttggggtgagtactccctctgaaaagcgggcatgacttctgcgctaagattgtcagtttccaaaaacgaggaggatttgatattcacctggcccgcggtgatgcctttgagggtggccgcatccatctggtcagaaaagacaatctttttgttgtcaagcttggtggcaaacgacccgtagagggcgttggacagcaacttggcgatggagcgcagggtttggtttttgtcgcgatcggcgcgctccttggccgcgatgtttagctgcacgtattcgcgcgcaacgcaccgccattcgggaaagacggtggtgcgctcgtcgggcaccaggtgcacgcgccaaccgcggttgtgcagggtgacaaggtcaacgctggtggctacctctccgcgtaggcgctcgttggtccagcagaggcggccgcccttgcgcgagcagaatggcggtagggggtctagctgcgtctcgtccggggggtctgcgtccacggtaaagaccccgggcagcaggcgcgcgtcgaagtagtctatcttgcatccttgcaagtctagcgcctgctgccatgcgcgggcggcaagcgcgcgctcgtatgggttgagtgggggaccccatggcatggggtgggtgagcgcggaggcgtacatgccgcaaatgtcgtaaacgtagaggggctctctgagtattccaagatatgtagggtagcatcttccaccgcggatgctggcgcgcacgtaatcgtatagttcgtgcgagggagcgaggaggtcgggaccgaggttgctacgggcgggctgctctgctcggaagactatctgcctgaagatggcatgtgagttggatgatatggttggacgctggaagacgttgaagctggcgtctgtgagacctaccgcgtcacgcacgaaggaggcgtaggagtcgcgcagcttgttgaccagctcggcggtgacctgcacgtctagggcgcagtagtccagggtttccttgatgatgtcatacttatcctgtcccttttttttccacagctcgcggttgaggacaaactcttcgcggtctttccagtactcttggatcggaaacccgtcggcctccgaacggtaagagcctagcatgtagaactggttgacggcctggtaggcgcagcatcccttttctacgggtagcgcgtatgcctgcgcggccttccggagcgaggtgtgggtgagcgcaaaggtgtccctgaccatgactttgaggtactggtatttgaagtcagtgtcgtcgcatccgccctgctcccagagcaaaaagtccgtgcgctttttggaacgcggatttggcagggcgaaggtgacatcgttgaagagtatctttcccgcgcgaggcataaagttgcgtgtgatgcggaagggtcccggcacctcggaacggttgttaattacctgggcggcgagcacgatctcgtcaaagccgttgatgttgtggcccacaatgtaaagttccaagaagcgcgggatgcccttgatggaaggcaattttttaagttcctcgtaggtgagctcttcaggggagctgagcccgtgctctgaaagggcccagtctgcaagatgagggttggaagcgacgaatgagctccacaggtcacgggccattagcatttgcaggtggtcgcgaaaggtcctaaactggcgacctatggccattttttctggggtgatgcagtagaaggtaagcgggtcttgttcccagcggtcccatccaaggttcgcggctaggtctcgcgcggcagtcactagaggctcatctccgccgaacttcatgaccagcatgaagggcacgagctgcttcccaaaggcccccatccaagtataggtctctacatcgtaggtgacaaagagacgctcggtgcgaggatgcgagccgatcgggaagaactggatctcccgccaccaattggaggagtggctattgatgtggtgaaagtagaagtccctgcgacgggccgaacactcgtgctggcttttgtaaaaacgtgcgcagtactggcagcggtgcacgggctgtacatcctgcacgaggttgacctgacgaccgcgcacaaggaagcagagtgggaatttgagcccctcgcctggcgggtttggctggtggtcttctacttcggctgcttgtccttgaccgtctggctgctcgaggggagttacggtggatcggaccaccacgccgcgcgagcccaaagtccagatgtccgcgcgcggcggtcggagcttgatgacaacatcgcgcagatgggagctgtccatggtctggagctcccgcggcgtcaggtcaggcgggagctcctgcaggtttacctcgcatagacgggtcagggcgcgggctagatccaggtgatacctaatttccaggggctggttggtggcggcgtcgatggcttgcaagaggccgcatccccgcggcgcgactacggtaccgcgcggcgggcggtgggccgcgggggtgtccttggatgatgcatctaaaagcggtgacgcgggcgagcccccggaggtagggggggctccggacccgccgggagagggggcaggggcacgtcggcgccgcgcgcgggcaggagctggtgctgcgcgcgtaggttgctggcgaacgcgacgacgcggcggttgatctcctgaatctggcgcctctgcgtgaagacgacgggcccggtgagcttgaacctgaaagagagttcgacagaatcaatttcggtgtcgttgacggcggcctggcgcaaaatctcctgcacgtctcctgagttgtcttgataggcgatctcggccatgaactgctcgatctcttcctcctggagatctccgcgtccggctcgctccacggtggcggcgaggtcgttggaaatgcgggccatgagctgcgagaaggcgttgaggcctccctcgttccagacgcggctgtagaccacgcccccttcggcatcgcgggcgcgcatgaccacctgcgcgagattgagctccacgtgccgggcgaagacggcgtagtttcgcaggcgctgaaagaggtagttgagggtggtggcggtgtgttctgccacgaagaagtacataacccagcgtcgcaacgtggattcgttgatatcccccaaggcctcaaggcgctccatggcctcgtagaagtccacggcgaagttgaaaaactgggagttgcgcgccgacacggttaactcctcctccagaagacggatgagctcggcgacagtgtcgcgcacctcgcgctcaaaggctacaggggcctcttcttcttcttcaatctcctcttccataagggcctccccttcttcttcttctggcggcggtgggggaggggggacacggcggcgacgacggcgcaccgggaggcggtcgacaaagcgctcgatcatctccccgcggcgacggcgcatggtctcggtgacggcgcggccgttctcgcgggggcgcagttggaagacgccgcccgtcatgtcccggttatgggttggcggggggctgccatgcggcagggatacggcgctaacgatgcatctcaacaattgttgtgtaggtactccgccgccgagggacctgagcgagtccgcatcgaccggatcggaaaacctctcgagaaaggcgtctaaccagtcacagtcgcaaggtaggctgagcaccgtggcgggcggcagcgggcggcggtcggggttgtttctggcggaggtgctgctgatgatgtaattaaagtaggcggtcttgagacggcggatggtcgacagaagcaccatgtccttgggtccggcctgctgaatgcgcaggcggtcggccatgccccaggcttcgttttgacatcggcgcaggtctttgtagtagtcttgcatgagcctttctaccggcacttcttcttctccttcctcttgtcctgcatctcttgcatctatcgctgcggcggcggcggagtttggccgtaggtggcgccctcttcctcccatgcgtgtgaccccgaagcccctcatcggctgaagcagggctaggtcggcgacaacgcgctcggctaatatggcctgctgcacctgcgtgagggtagactggaagtcatccatgtccacaaagcggtggtatgcgcccgtgttgatggtgtaagtgcagttggccataacggaccagttaacggtctggtgacccggctgcgagagctcggtgtacctgagacgcgagtaagccctcgagtcaaatacgtagtcgttgcaagtccgcaccaggtactggtatcccaccaaaaagtgcggcggcggctggcggtagaggggccagcgtagggtggccggggctccgggggcgagatcttccaacataaggcgatgatatccgtagatgtacctggacatccaggtgatgccggcggcggtggtggaggcgcgcggaaagtcgcggacgcggttccagatgttgcgcagcggcaaaaagtgctccatggtcgggacgctctggccggtcaggcgcgcgcaatcgttgacgctctagcgtgcaaaaggagagcctgtaagcgggcactcttccgtggtctggtggataaattcgcaagggtatcatggcggacgaccggggttcgagccccgtatccggccgtccgccgtgatccatgcggttaccgcccgcgtgtcgaacccaggtgtgcgacgtcagacaacgggggagtgctccttttggcttccttccaggcgcggcggctgctgcgctagcttttttggccactggccgcgcgcagcgtaagcggttaggctggaaagcgaaagcattaagtggctcgctccctgtagccggagggttattttccaagggttgagtcgcgggacccccggttcgagtctcggaccggccggactgcggcgaacgggggtttgcctccccgtcatgcaagaccccgcttgcaaattcctccggaaacagggacgagccccttttttgcttttcccagatgcatccggtgctgcggcagatgcgcccccctcctcagcagcggcaagagcaagagcagcggcagacatgcagggcaccctcccctcctcctaccgcgtcaggaggggcgacatccgcggttgacgcggcagcagatggtgattacgaacccccgcggcgccgggcccggcactacctggacttggaggagggcgagggcctggcgcggctaggagcgccctctcctgagcggcacccaagggtgcagctgaagcgtgatacgcgtgaggcgtacgtgccgcggcagaacctgtttcgcgaccgcgagggagaggagcccgaggagatgcgggatcgaaagttccacgcagggcgcgagctgcggcatggcctgaatcgcgagcggttgctgcgcgaggaggactttgagcccgacgcgcgaaccgggattagtcccgcgcgcgcacacgtggcggccgccgacctggtaaccgcatacgagcagacggtgaaccaggagattaactttcaaaaaagctttaacaaccacgtgcgtacgcttgtggcgcgcgaggaggtggctataggactgatgcatctgtgggactttgtaagcgcgctggagcaaaacccaaatagcaagccgctcatggcgcagctgttccttatagtgcagcacagcagggacaacgaggcattcagggatgcgctgctaaacatagtagagcccgagggccgctggctgctcgatttgataaacatcctgcagagcatagtggtgcaggagcgcagcttgagcctggctgacaaggtggccgccatcaactattccatgcttagcctgggcaagttttacgcccgcaagatataccataccccttacgttcccatagacaaggaggtaaagatcgaggggttctacatgcgcatggcgctgaaggtgcttaccttgagcgacgacctgggcgtttatcgcaacgagcgcatccacaaggccgtgagcgtgagccggcggcgcgagctcagcgaccgcgagctgatgcacagcctgcaaagggccctggctggcacgggcagcggcgatagagaggccgagtcctactttgacgcgggcgctgacctgcgctgggccccaagccgacgcgccctggaggcagctggggccggacctgggctggcggtggcacccgcgcgcgctggcaacgtcggcggcgtggaggaatatgacgaggacgatgagtacgagccagaggacggcgagtactaagcggtgatgtttctgatcagatgatgcaagacgcaacggacccggcggtgcgggcggcgctgcagagccagccgtccggccttaactccacggacgactggcgccaggtcatggaccgcatcatgtcgctgactgcgcgcaatcctgacgcgttccggcagcagccgcaggccaaccggctctccgcaattctggaagcggtggtcccggcgcgcgcaaaccccacgcacgagaaggtgctggcgatcgtaaacgcgctggccgaaaacagggccatccggcccgacgaggccggcctggtctacgacgcgctgcttcagcgcgtggctcgttacaacagcggcaacgtgcagaccaacctggaccggctggtgggggatgtgcgcgaggccgtggcgcagcgtgagcgcgcgcagcagcagggcaacctgggctccatggttgcactaaacgccttcctgagtacacagcccgccaacgtgccgcggggacaggaggactacaccaactttgtgagcgcactgcggctaatggtgactgagacaccgcaaagtgaggtgtaccagtctgggccagactattttttccagaccagtagacaaggcctgcagaccgtaaacctgagccaggctttcaaaaacttgcaggggctgtggggggtgcgggctcccacaggcgaccgcgcgaccgtgtctagcttgctgacgcccaactcgcgcctgttgctgctgctaatagcgcccttcacggacagtggcagcgtgtcccgggacacatacctaggtcacttgctgacactgtaccgcgaggccataggtcaggcgcatgtggacgagcatactttccaggagattacaagtgtcagccgcgcgctggggcaggaggacacgggcagcctggaggcaaccctaaactacctgctgaccaaccggcggcagaagatcccctcgttgcacagtttaaacagcgaggaggagcgcattttgcgctacgtgcagcagagcgtgagccttaacctgatgcgcgacggggtaacgcccagcgtggcgctggacatgaccgcgcgcaacatggaaccgggcatgtatgcctcaaaccggccgtttatcaaccgcctaatggactacttgcatcgcgcggccgccgtgaaccccgagtatttcaccaatgccatcttgaacccgcactggctaccgccccctggtttctacaccgggggattcgaggtgcccgagggtaacgatggattcctctgggacgacatagacgacagcgtgttttccccgcaaccgcagaccctgctagagttgcaacagcgcgagcaggcagaggcggcgctgcgaaaggaaagcttccgcaggccaagcagcttgtccgatctaggcgctgcggccccgcggtcagatgctagtagcccatttccaagcttgatagggtctcttaccagcactcgcaccacccgcccgcgcctgctgggcgaggaggagtacctaaacaactcgctgctgcagccgcagcgcgaaaaaaacctgcctccggcatttcccaacaacgggatagagagcctagtggacaagatgagtagatggaagacgtacgcgcaggagcacagggacgtgccaggcccgcgcccgcccacccgtcgtcaaaggcacgaccgtcagcggggtctggtgtgggaggacgatgactcggcagacgacagcagcgtcctggatttgggagggagtggcaacccgtttgcgcaccttcgccccaggctggggagaatgttttaaaaaaaaaaaagcatgatgcaaaataaaaaactcaccaaggccatggcaccgagcgttggttttcttgtattccccttagtatgcggcgcgcggcgatgtatgaggaaggtcctcctccctcctacgagagtgtggtgagcgcggcgccagtggcggcggcgctgggttctcccttcgatgctcccctggacccgccgtttgtgcctccgcggtacctgcggcctaccggggggagaaacagcatccgttactctgagttggcacccctattcgacaccacccgtgtgtacctggtggacaacaagtcaacggatgtggcatccctgaactaccagaacgaccacagcaactttctgaccacggtcattcaaaacaatgactacagcccgggggaggcaagcacacagaccatcaatcttgacgaccggtcgcactggggcggcgacctgaaaaccatcctgcataccaacatgccaaatgtgaacgagttcatgtttaccaataagtttaaggcgcgggtgatggtgtcgcgcttgcctactaaggacaatcaggtggagctgaaatacgagtgggtggagttcacgctgcccgagggcaactactccgagaccatgaccatagaccttatgaacaacgcgatcgtggagcactacttgaaagtgggcagacagaacggggttctggaaagcgacatcggggtaaagtttgacacccgcaacttcagactggggtttgaccccgtcactggtcttgtcatgcctggggtatatacaaacgaagccttccatccagacatcattttgctgccaggatgcggggtggacttcacccacagccgcctgagcaacttgttgggcatccgcaagcggcaacccttccaggagggctttaggatcacctacgatgatctggagggtggtaacattcccgcactgttggatgtggacgcctaccaggcgagcttgaaagatgacaccgaacagggcgggggtggcgcaggcggcagcaacagcagtggcagcggcgcggaagagaactccaacgcggcagccgcggcaatgcagccggtggaggacatgaacgatcatgccattcgcggcgacacctttgccacacgggctgaggagaagcgcgctgaggccgaagcagcggccgaagctgccgcccccgctgcgcaacccgaggtcgagaagcctcagaagaaaccggtgatcaaacccctgacagaggacagcaagaaacgcagttacaacctaataagcaatgacagcaccttcacccagtaccgcagctggtaccttgcatacaactacggcgaccctcagaccggaatccgctcatggaccctgctttgcactcctgacgtaacctgcggctcggagcaggtctactggtcgttgccagacatgatgcaagaccccgtgaccttccgctccacgcgccagatcagcaactttccggtggtgggcgccgagctgttgcccgtgcactccaagagcttctacaacgaccaggccgtctactcccaactcatccgccagtttacctctctgacccacgtgttcaatcgctttcccgagaaccagattttggcgcgcccgccagcccccaccatcaccaccgtcagtgaaaacgttcctgctctcacagatcacgggacgctaccgctgcgcaacagcatcggaggagtccagcgagtgaccattactgacgccagacgccgcacctgcccctacgtttacaaggccctgggcatagtctcgccgcgcgtcctatcgagccgcactttttgagcaagcatgtccatccttatatcgcccagcaataacacaggctggggcctgcgcttcccaagcaagatgtttggcggggccaagaagcgctccgaccaacacccagtgcgcgtgcgcgggcactaccgcgcgccctggggcgcgcacaaacgcggccgcactgggcgcaccaccgtcgatgacgccatcgacgcggtggtggaggaggcgcgcaactacacgcccacgccgccaccagtgtccacagtggacgcggccattcagaccgtggtgcgcggagcccggcgctatgctaaaatgaagagacggcggaggcgcgtagcacgtcgccaccgccgccgacccggcactgccgcccaacgcgcggcggcggccctgcttaaccgcgcacgtcgcaccggccgacgggcggccatgcgggccgctcgaaggctggccgcgggtattgtcactgtgccccccaggtccaggcgacgagcggccgccgcagcagccgcggccattagtgctatgactcagggtcgcaggggcaacgtgtattgggtgcgcgactcggttagcggcctgcgcgtgcccgtgcgcacccgccccccgcgcaactagattgcaagaaaaaactacttagactcgtactgttgtatgtatccagcggcggcggcgcgcaacgaagctatgtccaagcgcaaaatcaaagaagagatgctccaggtcatcgcgccggagatctatggccccccgaagaaggaagagcaggattacaagccccgaaagctaaagcgggtcaaaaagaaaaagaaagatgatgatgatgaacttgacgacgaggtggaactgctgcacgctaccgcgcccaggcgacgggtacagtggaaaggtcgacgcgtaaaacgtgttttgcgacccggcaccaccgtagtctttacgcccggtgagcgctccacccgcacctacaagcgcgtgtatgatgaggtgtacggcgacgaggacctgcttgagcaggccaacgagcgcctcggggagtttgcctacggaaagcggcataaggacatgctggcgttgccgctggacgagggcaacccaacacctagcctaaagcccgtaacactgcagcaggtgctgcccgcgcttgcaccgtccgaagaaaagcgcggcctaaagcgcgagtctggtgacttggcacccaccgtgcagctgatggtacccaagcgccagcgactggaagatgtcttggaaaaaatgaccgtggaacctgggctggagcccgaggtccgcgtgcggccaatcaagcaggtggcgccgggactgggcgtgcagaccgtggacgttcagatacccactaccagtagcaccagtattgccaccgccacagagggcatggagacacaaacgtccccggttgcctcagcggtggcggatgccgcggtgcaggcggtcgctgcggccgcgtccaagacctctacggaggtgcaaacggacccgtggatgtttcgcgtttcagccccccggcgcccgcgccgttcgaggaagtacggcgccgccagcgcgctactgcccgaatatgccctacatccttccattgcgcctacccccggctatcgtggctacacctaccgccccagaagacgagcaactacccgacgccgaaccaccactggaacccgccgccgccgtcgccgtcgccagcccgtgctggccccgatttccgtgcgcagggtggctcgcgaaggaggcaggaccctggtgctgccaacagcgcgctaccaccccagcatcgtttaaaagccggtctttgtggttcttgcagatatggccctcacctgccgcctccgtttcccggtgccgggattccgaggaagaatgcaccgtaggaggggcatggccggccacggcctgacgggcggcatgcgtcgtgcgcaccaccggcggcggcgcgcgtcgcaccgtcgcatgcgcggcggtatcctgcccctccttattccactgatcgccgcggcgattggcgccgtgcccggaattgcatccgtggccttgcaggcgcagagacactgattaaaaacaagttgcatgtggaaaaatcaaaataaaaagtctggactctcacgctcgcttggtcctgtaactattttgtagaatggaagacatcaactttgcgtctctggccccgcgacacggctcgcgcccgttcatgggaaactggcaagatatcggcaccagcaatatgagcggtggcgccttcagctggggctcgctgtggagcggcattaaaaatttcggttccaccgttaagaactatggcagcaaggcctggaacagcagcacaggccagatgctgagggataagttgaaagagcaaaatttccaacaaaaggtggtagatggcctggcctctggcattagcggggtggtggacctggccaaccaggcagtgcaaaataagattaacagtaagcttgatccccgccctcccgtagaggagcctccaccggccgtggagacagtgtctccagaggggcgtggcgaaaagcgtccgcgccccgacagggaagaaactctggtgacgcaaatagacgagcctccctcgtacgaggaggcactaaagcaaggcctgcccaccacccgtcccatcgcgcccatggctaccggagtgctgggccagcacacacccgtaacgctggacctgcctccccccgccgacacccagcagaaacctgtgctgccaggcccgaccgccgttgttgtaacccgtcctagccgcgcgtccctgcgccgcgccgccagcggtccgcgatcgttgcggcccgtagccagtggcaactggcaaagcacactgaacagcatcgtgggtctgggggtgcaatccctgaagcgccgacgatgcttctgatagctaacgtgtcgtatgtgtgtcatgtatgcgtccatgtcgccgccagaggagctgctgagccgccgcgcgcccgctttccaagatggctaccccttcgatgatgccgcagtggtcttacatgcacatctcgggccaggacgcctcggagtacctgagccccgggctggtgcagtttgcccgcgccaccgagacgtacttcagcctgaataacaagtttagaaaccccacggtggcgcctacgcacgacgtgaccacagaccggtcccagcgtttgacgctgcggttcatccctgtggaccgtgaggatactgcgtactcgtacaaggcgcggttcaccctagctgtgggtgataaccgtgtgctggacatggcttccacgtactttgacatccgcggcgtgctggacaggggccctacttttaagccctactctggcactgcctacaacgccctggctcccaagggtgccccaaatccttgcgaatgggatgaagctgctactgctcttgaaataaacctagaagaagaggacgatgacaacgaagacgaagtagacgagcaagctgagcagcaaaaaactcacgtatttgggcaggcgccttattctggtataaatattacaaaggagggtattcaaataggtgtcgaaggtcaaacacctaaatatgccgataaaacatttcaacctgaacctcaaataggagaatctcagtggtacgaaacagaaattaatcatgcagctgggagagtcctaaaaaagactaccccaatgaaaccatgttacggttcatatgcaaaacccacaaatgaaaatggagggcaaggcattcttgtaaagcaacaaaatggaaagctagaaagtcaagtggaaatgcaatttttctcaactactgaggcagccgcaggcaatggtgataacttgactcctaaagtggtattgtacagtgaagatgtagatatagaaaccccagacactcatatttcttacatgcccactattaaggaaggtaactcacgagaactaatgggccaacaatctatgcccaacaggcctaattacattgcttttagggacaattttattggtctaatgtattacaacagcacgggtaatatgggtgttctggcgggccaagcatcgcagttgaatgctgttgtagatttgcaagacagaaacacagagctttcataccagcttttgcttgattccattggtgatagaaccaggtacttttctatgtggaatcaggctgttgacagctatgatccagatgttagaattattgaaaatcatggaactgaagatgaacttccaaattactgctttccactgggaggtgtgattaatacagagactcttaccaaggtaaaacctaaaacaggtcaggaaaatggatgggaaaaagatgctacagaattttcagataaaaatgaaataagagttggaaataattttgccatggaaatcaatctaaatgccaacctgtggagaaatttcctgtactccaacatagcgctgtatttgcccgacaagctaaagtacagtccttccaacgtaaaaatttctgataacccaaacacctacgactacatgaacaagcgagtggtggctcccgggctagtggactgctacattaaccttggagcacgctggtcccttgactatatggacaacgtcaacccatttaaccaccaccgcaatgctggcctgcgctaccgctcaatgttgctgggcaatggtcgctatgtgcccttccacatccaggtgcctcagaagttctttgccattaaaaacctccttctcctgccgggctcatacacctacgagtggaacttcaggaaggatgttaacatggttctgcagagctccctaggaaatgacctaagggttgacggagccagcattaagtttgatagcatttgcctttacgccaccttcttccccatggcccacaacaccgcctccacgcttgaggccatgcttagaaacgacaccaacgaccagtcctttaacgactatctctccgccgccaacatgctctaccctatacccgccaacgctaccaacgtgcccatatccatcccctcccgcaactgggcggctttccgcggctgggccttcacgcgccttaagactaaggaaaccccatcactgggctcgggctacgacccttattacacctactctggctctataccctacctagatggaaccttttacctcaaccacacctttaagaaggtggccattacctttgactcttctgtcagctggcctggcaatgaccgcctgcttacccccaacgagtttgaaattaagcgctcagttgacggggagggttacaacgttgcccagtgtaacatgaccaaagactggttcctggtacaaatgctagctaactataacattggctaccagggcttctatatcccagagagctacaaggaccgcatgtactccttctttagaaacttccagcccatgagccgtcaggtggtggatgatactaaatacaaggactaccaacaggtgggcatcctacaccaacacaacaactctggatttgttggctaccttgcccccaccatgcgcgaaggacaggcctaccctgctaacttcccctatccgcttataggcaagaccgcagttgacagcattacccagaaaaagtttctttgcgatcgcaccctttggcgcatcccattctccagtaactttatgtccatgggcgcactcacagacctgggccaaaaccttctctacgccaactccgcccacgcgctagacatgacttttgaggtggatcccatggacgagcccacccttctttatgttttgtttgaagtctttgacgtggtccgtgtgcaccagccgcaccgcggcgtcatcgaaaccgtgtacctgcgcacgcccttctcggccggcaacgccacaacataaagaagcaagcaacatcaacaacagctgccgccatgggctccagtgagcaggaactgaaagccattgtcaaagatcttggttgtgggccatattttttgggcacctatgacaagcgctttccaggctttgtttctccacacaagctcgcctgcgccatagtcaatacggccggtcgcgagactgggggcgtacactggatggcctttgcctggaacccgcactcaaaaacatgctacctctttgagccctttggcttttctgaccagcgactcaagcaggtttaccagtttgagtacgagtcactcctgcgccgtagcgccattgcttcttcccccgaccgctgtataacgctggaaaagtccacccaaagcgtacaggggcccaactcggccgcctgtggactattctgctgcatgtttctccacgcctttgccaactggccccaaactcccatggatcacaaccccaccatgaaccttattaccggggtacccaactccatgctcaacagtccccaggtacagcccaccctgcgtcgcaaccaggaacagctctacagcttcctggagcgccactcgccctacttccgcagccacagtgcgcagattaggagcgccacttctttttgtcacttgaaaaacatgtaaaaataatgtactagagacactttcaataaaggcaaatgcttttatttgtacactctcgggtgattatttacccccacccttgccgtctgcgccgtttaaaaatcaaaggggttctgccgcgcatcgctatgcgccactggcagggacacgttgcgatactggtgtttagtgctccacttaaactcaggcacaaccatccgcggcagctcggtgaagttttcactccacaggctgcgcaccatcaccaacgcgtttagcaggtcgggcgccgatatcttgaagtcgcagttggggcctccgccctgcgcgcgcgagttgcgatacacagggttgcagcactggaacactatcagcgccgggtggtgcacgctggccagcacgctcttgtcggagatcagatccgcgtccaggtcctccgcgttgctcagggcgaacggagtcaactttggtagctgccttcccaaaaagggcgcgtgcccaggctttgagttgcactcgcaccgtagtggcatcaaaaggtgaccgtgcccggtctgggcgttaggatacagcgcctgcataaaagccttgatctgcttaaaagccacctgagcctttgcgccttcagagaagaacatgccgcaagacttgccggaaaactgattggccggacaggccgcgtcgtgcacgcagcaccttgcgtcggtgttggagatctgcaccacatttcggccccaccggttcttcacgatcttggccttgctagactgctccttcagcgcgcgctgcccgttttcgctcgtcacatccatttcaatcacgtgctccttatttatcataatgcttccgtgtagacacttaagctcgccttcgatctcagcgcagcggtgcagccacaacgcgcagcccgtgggctcgtgatgcttgtaggtcacctctgcaaacgactgcaggtacgcctgcaggaatcgccccatcatcgtcacaaaggtcttgttgctggtgaaggtcagctgcaacccgcggtgctcctcgttcagccaggtcttgcatacggccgccagagcttccacttggtcaggcagtagtttgaagttcgcctttagatcgttatccacgtggtacttgtccatcagcgcgcgcgcagcctccatgcccttctcccacgcagacacgatcggcacactcagcgggttcatcaccgtaatttcactttccgcttcgctgggctcttcctcttcctcttgcgtccgcataccacgcgccactgggtcgtcttcattcagccgccgcactgtgcgcttacctcctttgccatgcttgattagcaccggtgggttgctgaaacccaccatttgtagcgccacatcttctctttcttcctcgctgtccacgattacctctggtgatggcgggcgctcgggcttgggagaagggcgcttctttttcttcttgggcgcaatggccaaatccgccgccgaggtcgatggccgcgggctgggtgtgcgcggcaccagcgcgtcttgtgatgagtcttcctcgtcctcggactcgatacgccgcctcatccgcttttttgggggcgcccggggaggcggcggcgacggggacggggacgacacgtcctccatggttgggggacgtcgcgccgcaccgcgtccgcgctcgggggtggtttcgcgctgctcctcttcccgactggccatttccttctcctataggcagaaaaagatcatggagtcagtcgagaagaaggacagcctaaccgccccctctgagttcgccaccaccgcctccaccgatgccgccaacgcgcctaccaccttccccgtcgaggcacccccgcttgaggaggaggaagtgattatcgagcaggacccaggttttgtaagcgaagacgacgaggaccgctcagtaccaacagaggataaaaagcaagaccaggacaacgcagaggcaaacgaggaacaagtcgggcggggggacgaaaggcatggcgactacctagatgtgggagacgacgtgctgttgaagcatctgcagcgccagtgcgccattatctgcgacgcgttgcaagagcgcagcgatgtgcccctcgccatagcggatgtcagccttgcctacgaacgccacctattctcaccgcgcgtaccccccaaacgccaagaaaacggcacatgcgagcccaacccgcgcctcaacttctaccccgtatttgccgtgccagaggtgcttgccacctatcacatctttttccaaaactgcaagatacccctatcctgccgtgccaaccgcagccgagcggacaagcagctggccttgcggcagggcgctgtcatacctgatatcgcctcgctcaacgaagtgccaaaaatctttgagggtcttggacgcgacgagaagcgcgcggcaaacgctctgcaacaggaaaacagcgaaaatgaaagtcactctggagtgttggtggaactcgagggtgacaacgcgcgcctagccgtactaaaacgcagcatcgaggtcacccactttgcctacccggcacttaacctaccccccaaggtcatgagcacagtcatgagtgagctgatcgtgcgccgtgcgcagcccctggagagggatgcaaatttgcaagaacaaacagaggagggcctacccgcagttggcgacgagcagctagcgcgctggcttcaaacgcgcgagcctgccgacttggaggagcgacgcaaactaatgatggccgcagtgctcgttaccgtggagcttgagtgcatgcagcggttctttgctgacccggagatgcagcgcaagctagaggaaacattgcactacacctttcgacagggctacgtacgccaggcctgcaagatctccaacgtggagctctgcaacctggtctcctaccttggaattttgcacgaaaaccgccttgggcaaaacgtgcttcattccacgctcaagggcgaggcgcgccgcgactacgtccgcgactgcgtttacttatttctatgctacacctggcagacggccatgggcgtttggcagcagtgcttggaggagtgcaacctcaaggagctgcagaaactgctaaagcaaaacttgaaggacctatggacggccttcaacgagcgctccgtggccgcgcacctggcggacatcattttccccgaacgcctgcttaaaaccctgcaacagggtctgccagacttcaccagtcaaagcatgttgcagaactttaggaactttatcctagagcgctcaggaatcttgcccgccacctgctgtgcacttcctagcgactttgtgcccattaagtaccgcgaatgccctccgccgctttggggccactgctaccttctgcagctagccaactaccttgcctaccactctgacataatggaagacgtgagcggtgacggtctactggagtgtcactgtcgctgcaacctatgcaccccgcaccgctccctggtttgcaattcgcagctgcttaacgaaagtcaaattatcggtacctttgagctgcagggtccctcgcctgacgaaaagtccgcggctccggggttgaaactcactccggggctgtggacgtcggcttaccttcgcaaatttgtacctgaggactaccacgcccacgagattaggttctacgaagaccaatcccgcccgcctaatgcggagcttaccgcctgcgtcattacccagggccacattcttggccaattgcaagccatcaacaaagcccgccaagagtttctgctacgaaagggacggggggtttacttggacccccagtccggcgaggagctcaacccaatccccccgccgccgcagccctatcagcagcagccgcgggcccttgcttcccaggatggcacccaaaaagaagctgcagctgccgccgccacccacggacgaggaggaatactgggacagtcaggcagaggaggttttggacgaggaggaggaggacatgatggaagactgggagagcctagacgaggaagcttccgaggtcgaagaggtgtcagacgaaacaccgtcaccctcggtcgcattcccctcgccggcgccccagaaatcggcaaccggttccagcatggctacaacctccgctcctcaggcgccgccggcactgcccgttcgccgacccaaccgtagatgggacaccactggaaccagggccggtaagtccaagcagccgccgccgttagcccaagagcaacaacagcgccaaggctaccgctcatggcgcgggcacaagaacgccatagttgcttgcttgcaagactgtgggggcaacatctccttcgcccgccgctttcttctctaccatcacggcgtggccttcccccgtaacatcctgcattactaccgtcatctctacagcccatactgcaccggcggcagcggcagcaacagcagcggccacacagaagcaaaggcgaccggatagcaagactctgacaaagcccaagaaatccacagcggcggcagcagcaggaggaggagcgctgcgtctggcgcccaacgaacccgtatcgacccgcgagcttagaaacaggatttttcccactctgtatgctatatttcaacagagcaggggccaagaacaagagctgaaaataaaaaacaggtctctgcgatccctcacccgcagctgcctgtatcacaaaagcgaagatcagcttcggcgcacgctggaagacgcggaggctctcttcagtaaatactgcgcgctgactcttaaggactagtttcgcgccctttctcaaatttaagcgcgaaaactacgtcatctccagcggccacacccggcgccagcacctgttgtcagcgccattatgagcaaggaaattcccacgccctacatgtggagttaccagccacaaatgggacttgcggctggagctgcccaagactactcaacccgaataaactacatgagcgcgggaccccacatgatatcccgggtcaacggaatacgcgcccaccgaaaccgaattctcctggaacaggcggctattaccaccacacctcgtaataaccttaatccccgtagttggcccgctgccctggtgtaccaggaaagtcccgctcccaccactgtggtacttcccagagacgcccaggccgaagttcagatgactaactcaggggcgcagcttgcgggcggctttcgtcacagggtgcggtcgcccgggcagggtataactcacctgacaatcagagggcgaggtattcagctcaacgacgagtcggtgagctcctcgcttggtctccgtccggacgggacatttcagatcggcggcgccggccgctcttcattcacgcctcgtcaggcaatcctaactctgcagacctcgtcctctgagccgcgctctggaggcattggaactctgcaatttattgaggagtttgtgccatcggtctactttaaccccttctcgggacctcccggccactatccggatcaatttattcctaactttgacgcggtaaaggactcggcggacggctacgactgaatgttaagtggagaggcagagcaactgcgcctgaaacacctggtccactgtcgccgccacaagtgctttgcccgcgactccggtgagttttgctactttgaattgcccgaggatcatatcgagggcccggcgcacggcgtccggcttaccgcccagggagagcttgcccgtagcctgattcgggagtttacccagcgccccctgctagttgagcgggacaggggaccctgtgttctcactgtgatttgcaactgtcctaaccctggattacatcaagatcctctagttaatgtcaggtcgcctaagtcgattaactagagtacccggggatcttattccctttaactaataaaaaaaaataataaagcatcacttacttaaaatcagttagcaaatttctgtccagtttattcagcagcacctccttgccctcctcccagctctggtattgcagcttcctcctggctgcaaactttctccacaatctaaatggaatgtcagtttcctcctgttcctgtccatccgcacccactatcttcatgttgttgcagatgaagcgcgcaagaccgtctgaagataccttcaaccccgtgtatccatatgacacggaaaccggtcctccaactgtgccttttcttactcctccctttgtatcccccaatgggtttcaagagagtccccctggggtactctctttgcgcctatccgaacctctagttacctccaatggcatgcttgcgctcaaaatgggcaacggcctctctctggacgaggccggcaaccttacctcccaaaatgtaaccactgtgagcccacctctcaaaaaaaccaagtcaaacataaacctggaaatatctgcacccctcacagttacctcagaagccctaactgtggctgccgccgcacctctaatggtcgcgggcaacacactcaccatgcaatcacaggccccgctaaccgtgcacgactccaaacttagcattgccacccaaggacccctcacagtgtcagaaggaaagctagccctgcaaacatcaggccccctcaccaccaccgatagcagtacccttactatcactgcctcaccccctctaactactgccactggtagcttgggcattgacttgaaagagcccatttatacacaaaatggaaaactaggactaaagtacggggctcctttgcatgtaacagacgacctaaacactttgaccgtagcaactggtccaggtgtgactattaataatacttccttgcaaactaaagttactggagccttgggttttgattcacaaggcaatatgcaacttaatgtagcaggaggactaaggattgattctcaaaacagacgccttatacttgatgttagttatccgtttgatgctcaaaaccaactaaatctaagactaggacagggccctctttttataaactcagcccacaacttggatattaactacaacaaaggcctttacttgtttacagcttcaaacaattccaaaaagcttgaggttaacctaagcactgccaaggggttgatgtttgacgctacagccatagccattaatgcaggagatgggcttgaatttggttcacctaatgcaccaaacacaaatcccctcaaaacaaaaattggccatggcctagaatttgattcaaacaaggctatggttcctaaactaggaactggccttagttttgacagcacaggtgccattacagtaggaaacaaaaataatgataagctaactttgtggaccggaataaaccctccacctaactgtcaaattgtggaaaacactaatacaaatgatggcaaacttactttagtattagtaaaaaatggagggcttgttaatggctacgtgtctctagttggtgtatcagacactgtgaaccaaatgttcacacaaaagacagcaaacatccaattaagattatattttgactcttctggaaatctattaactgaggaatcagacttaaaaattccacttaaaaataaatcttctacagcgaccagtgaaactgtagccagcagcaaagcctttatgccaagtactacagcttatcccttcaacaccactactagggatagtgaaaactacattcatggaatatgttactacatgactagttatgatagaagtctatttcccttgaacatttctataatgctaaacagccgtatgatttcttccaatgttgcctatgccatacaatttgaatggaatctaaatgcaagtgaatctccagaaagcaacatagctacgctgaccacatccccctttttcttttcttacattacagaagacgacaactaaagaatcgtttgtgttatgtttcaacgtgtttatttttcaattgcagaaaatttcaagtcatttttcattcagtagtatagccccaccaccacatagcttatacagatcaccgtaccttaatcaaactcacagaaccctagtattcaacctgccacctccctcccaacacacagagtacacagtcctttctccccggctggccttaaaaagcatcatatcatgggtaacagacatattcttaggtgttatattccacacggtttcctgtcgagccaaacgctcatcagtgatattaataaactccccgggcagctcacttaagttcatgtcgctgtccagctgctgagccacaggctgctgtccaacttgcggttgcttaacgggcggcgaaggagaagtccacgcctacatgggggtagagtcataatcgtgcatcaggatagggcggtggtgctgcagcagcgcgcgaataaactgctgccgccgccgctccgtcctgcaggaatacaacatggcagtggtctcctcagcgatgattcgcaccgcccgcagcataaggcgccttgtcctccgggcacagcagcgcaccctgatctcacttaaatcagcacagtaactgcagcacagcaccacaatattgttcaaaatcccacagtgcaaggcgctgtatccaaagctcatggcggggaccacagaacccacgtggccatcataccacaagcgcaggtagattaagtggcgacccctcataaacacgctggacataaacattacctcttttggcatgttgtaattcaccacctcccctctgattaaacatggcgccatccaccaccatcctaaaccagctggccaaaacctgcccgccggctatacactgcagggaaccgggactggaacaatgacagtggagagcccaggactcgtaaccatggatcatcatgctcgtcatgatatcaatgttggcacaacacaggcacacgtgcatacacttcctcaggattacaagctcctcccgcgttagaaccatatcccagggaacaacccattcctgaatcagcgtaaatcccacactgcagggaagacctcgcacgtaactcacgttgtgcattgtcaaagtgttacattcgggcagcagcggatgatcctccagtatggtagcgcgggtttctgtctcaaaaggaggtagacgatccctactgtacggagtgcgccgagacaaccgagatcgtgttggtcgtagtgtcatgccaaatggaacgccggacgtagtcatatttcctgaagcaaaaccaggtgcgggcgtgacaaacagatctgcgtctccggtctcgccgcttagatcgctctgtgtagtagttgtagtatatccactctctcaaagcatccaggcgccccctggcttcgggttctatgtaaactccttcatgcgccgctgccctgataacatccaccaccgcagaataagccacacccagccaacctacacattcgttctgcgagtcacacacgggaggagcgggaagagctggaagaaccatgtttttttttttattccaaaagattatccaaaacctcaaaatgaagatctattaagtgaacgcgctcccctccggtggcgtggtcaaactctacagccaaagaacagataatggcatttgtaagatgttgcacaatggcttccaaaaggcaaacggccctcacgtccaagtggacgtaaaggctaaacccttcagggtgaatctcctctataaacattccagcaccttcaaccatgcccaaataattctcatctcgccaccttctcaatatatctctaagcaaatcccgaatattaagtccggccattgtaaaaatctgctccagagcgccctccaccttcagcctcaagcagcgaatcatgattgcaaaaattcaggttcctcacagacctgtataagattcaaaagcggaacattaacaaaaataccgcgatcccgtaggtcccttcgcagggccagctgaacataatcgtgcaggtctgcacggaccagcgcggccacttccccgccaggaaccatgacaaaagaacccacactgattatgacacgcatactcggagctatgctaaccagcgtagccccgatgtaagcttgttgcatgggcggcgatataaaatgcaaggtgctgctcaaaaaatcaggcaaagcctcgcgcaaaaaagaaagcacatcgtagtcatgctcatgcagataaaggcaggtaagctccggaaccaccacagaaaaagacaccatttttctctcaaacatgtctgcgggtttctgcataaacacaaaataaaataacaaaaaaacatttaaacattagaagcctgtcttacaacaggaaaaacaacccttataagcataagacggactacggccatgccggcgtgaccgtaaaaaaactggtcaccgtgattaaaaagcaccaccgacagctcctcggtcatgtccggagtcataatgtaagactcggtaaacacatcaggttgattcacatcggtcagtgctaaaaagcgaccgaaatagcccgggggaatacatacccgcaggcgtagagacaacattacagcccccataggaggtataacaaaattaataggagagaaaaacacataaacacctgaaaaaccctcctgcctaggcaaaatagcaccctcccgctccagaacaacatacagcgcttccacagcggcagccataacagtcagccttaccagtaaaaaagaaaacctattaaaaaaacaccactcgacacggcaccagctcaatcagtcacagtgtaaaaaagggccaagtgcagagcgagtatatataggactaaaaaatgacgtaacggttaaagtccacaaaaaacacccagaaaaccgcacgcgaacctacgcccagaaacgaaagccaaaaaacccacaacttcctcaaatcgtcacttccgttttcccacgttacgtcacttcccattttaagaaaactacaattcccaacacatacaagttactccgccctaaaacctacgtcacccgccccgttcccacgccccgcgccacgtcacaaactccaccccctcattatcatattggcttcaatccaaaataaggtatattattgatgatg

SEQ ID NO: 29 - DNA, 35453 bp, Artificial Sequence
  Adk35F2-Spike/E4orf6(RSV)-E4dl-711(E4re#27)
ttaattaacatcatcaataatataccttattttggattgaagccaatatgataatgagggggtggagtttgtgacgtggcgcggggcgtgggaacggggcgggtgacgtagtagtgtggcggaagtgtgatgttgcaagtgtggcggaacacatgtaagcgacggatgtggcaaaagtgacgtttttggtgtgcgccggtgtacacaggaagtgacaattttcgcgcggttttaggcggatgttgtagtaaatttgggcgtaaccgagtaagatttggccattttcgcgggaaaactgaataagaggaagtgaaatctgaataattttgtgttactcatagcgcgtaataatttctgtaatagtaatcaattacggggtcattagttcatagcccatatatggagttccgcgttacataacttacggtaaatggcccgcctggctgaccgcccaacgacccccgcccattgacgtcaataatgacgtatgttcccatagtaacgccaatagggactttccattgacgtcaatgggtggagtatttacggtaaactgcccacttggcagtacatcaagtgtatcatatgccaagtacgccccctattgacgtcaatgacggtaaatggcccgcctggcattatgcccagtacatgaccttatgggactttcctacttggcagtacatctacgtattagtcatcgctattaccatggtgatgcggttttggcagtacatcaatgggcgtggatagcggtttgactcacggggatttccaagtctccaccccattgacgtcaatgggagtttgttttggcaccaaaatcaacgggactttccaaaatgtcgtaacaactccgccccattgacgcaaatgggcggtaggcgtgtacggtgggaggtctatataagcagagctctccctatcagtgatagagatctccctatcagtgatagagatcgtcgacgagctcgtttagtgaaccgtcagatcgcctggagacgccatccacgctgttttgacctccatagaagacaccgggaccgatccagcctccgatttgccaccatgtttgtgttcctggtgctgctgccactggtgtccagccagtgtgtgaacctgaccaccaggacccaacttcctcctgcctacaccaactccttcaccaggggagtctactaccctgacaaggtgttcaggtcctctgtgctgcacagcacccaggacctgttcctgccattcttcagcaatgtgacctggttccatgccatccatgtgtctggcaccaatggcaccaagaggtttgacaaccctgtgctgccattcaatgatggagtctactttgccagcacagagaagagcaacatcatcaggggctggatttttggcaccaccctggacagcaagacccagtccctgctgattgtgaacaatgccaccaatgtggtgattaaggtgtgtgagttccagttctgtaatgacccattcctgggagtctactaccacaagaacaacaagtcctggatggagtctgagttcagggtctactcctctgccaacaactgtacctttgaatatgtgagccaaccattcctgatggacttggagggcaagcagggcaacttcaagaacctgagggagtttgtgttcaagaacattgatggctacttcaagatttacagcaaacacacaccaatcaacctggtgagggacctgccacagggcttctctgccttggaaccactggtggacctgccaattggcatcaacatcaccaggttccagaccctgctggctctgcacaggtcctacctgacacctggagactcctcctctggctggacagcaggagcagcagcctactatgtgggctacctccaaccaaggaccttcctgctgaaatacaatgagaatggcaccatcacagatgctgtggactgtgccctggacccactgtctgagaccaagtgtaccctgaaatccttcacagtggagaagggcatctaccagaccagcaacttcagggtccaaccaacagagagcattgtgaggtttccaaacatcaccaacctgtgtccatttggagaggtgttcaatgccaccaggtttgcctctgtctatgcctggaacaggaagaggattagcaactgtgtggctgactactctgtgctctacaactctgcctccttcagcaccttcaagtgttatggagtgagcccaaccaaactgaatgacctgtgtttcaccaatgtctatgctgactcctttgtgattaggggagatgaggtgagacagattgcccctggacaaacaggcaagattgctgactacaactacaaactgcctgatgacttcacaggctgtgtgattgcctggaacagcaacaacctggacagcaaggtgggaggcaactacaactacctctacagactgttcaggaagagcaacctgaaaccatttgagagggacatcagcacagagatttaccaggctggcagcacaccatgtaatggagtggagggcttcaactgttactttccactccaatcctatggcttccaaccaaccaatggagtgggctaccaaccatacagggtggtggtgctgtcctttgaactgctccatgcccctgccacagtgtgtggaccaaagaagagcaccaacctggtgaagaacaagtgtgtgaacttcaacttcaatggactgacaggcacaggagtgctgacagagagcaacaagaagttcctgccattccaacagtttggcagggacattgctgacaccacagatgctgtgagggacccacagaccttggagattctggacatcacaccatgttcctttggaggagtgtctgtgattacacctggcaccaacaccagcaaccaggtggctgtgctctaccaggatgtgaactgtactgaggtgcctgtggctatccatgctgaccaacttacaccaacctggagggtctacagcacaggcagcaatgtgttccagaccagggctggctgtctgattggagcagagcatgtgaacaactcctatgagtgtgacatcccaattggagcaggcatctgtgcctcctaccagacccagaccggtggcggtgggtcgaggtctgtggcaagccagagcatcattgcctacacaatgagtctgggagcagagaactctgtggcttacagcaacaacagcattgccatcccaaccaacttcaccatctctgtgaccacagagattctgcctgtgagtatgaccaagacctctgtggactgtacaatgtatatctgtggagacagcacagagtgtagcaacctgctgctccaatatggctccttctgtacccaacttaacagggctctgacaggcattgctgtggaacaggacaagaacacccaggaggtgtttgcccaggtgaagcagatttacaagacacctccaatcaaggactttggaggcttcaacttcagccagattctgcctgacccaagcaagccaagcaagaggtccttcattgaggacctgctgttcaacaaggtgaccctggctgatgctggcttcatcaagcaatatggagactgtctgggagacattgctgccagggacctgatttgtgcccagaagttcaatggactgacagtgctgcctccactgctgacagatgagatgattgcccaatacacctctgccctgctggctggcaccatcacctctggctggacctttggagcaggagcagccctccaaatcccatttgctatgcagatggcttacaggttcaatggcattggagtgacccagaatgtgctctatgagaaccagaaactgattgccaaccagttcaactctgccattggcaagattcaggactccctgtccagcacagcctctgccctgggcaaactccaagatgtggtgaaccagaatgcccaggctctgaacaccctggtgaagcaactttccagcaactttggagccatctcctctgtgctgaatgacatcctgagcagactggacaaggtggaggctgaggtccagattgacagactgattacaggcagactccaatccctccaaacctatgtgacccaacaacttatcagggctgctgagattagggcatctgccaacctggctgccaccaagatgagtgagtgtgtgctgggacaaagcaagagggtggacttctgtggcaagggctaccacctgatgagttttccacagtctgcccctcatggagtggtgttcctgcatgtgacctatgtgcctgcccaggagaagaacttcaccacagcccctgccatctgccatgatggcaaggctcactttccaagggagggagtgtttgtgagcaatggcacccactggtttgtgacccagaggaacttctatgaaccacagattatcaccacagacaacacctttgtgtctggcaactgtgatgtggtgattggcattgtgaacaacacagtctatgacccactccaacctgaactggactccttcaaggaggaactggacaaatacttcaagaaccacaccagccctgatgtggacctgggagacatctctggcatcaatgcctctgtggtgaacatccagaaggagattgacagactgaatgaggtggctaagaacctgaatgagtccctgattgacctccaagaactgggcaaatatgaacaatacatcaagtggccatgaaaattgatcataatcagccataccacatttgtagaggttttacttgctttaaaaaacctcccacacctccccctgaacctgaaacataaaatgaatgcaattgttgttgttaacttgtttattgcagcttataatggttacaaataaagcaatagcatcacaaatttcacaaataaagcatttttttcactgcattctagttgtggtttgtccaaactcatcaatgtatcttaacgcggatctgtagtcttatgcaatactcttgtagtcttgcaacatggtaacgatgagttagcaacatgccttacaaggagagaaaaagcaccgtgcatgccgattggtggaagtaaggtggtacgatcgtgccttattaggaaggcaacagacgggtctgacatggattggacgaaccactgaattgccgcattgcagagatattgtatttaagtgcctagctcgatacataaacaaactaccccaagctggccaccatgactacgtccggcgttccatttggcatgacactacgaccaacacgatctcggttgtctcggcgcactccgtacagtagggatcgtctacctccttttgagacagaaacccgcgctaccatactggaggatcatccgctgctgcccgaatgtaacactttgacaatgcacaacgtgagttacgtgcgaggtcttccctgcagtgtgggatttacgctgattcaggaatgggttgttccctgggatatggttctaacgcgggaggagcttgtaatcctgaggaagtgtatgcacgtgtgcctgtgttgtgccaacattgatatcatgacgagcatgatgatccatggttacgagtcctgggctctccactgtcattgttccagtcccggttccctgcagtgtatagccggcgggcaggttttggccagctggtttaggatggtggtggatggcgccatgtttaatcagaggtttatatggtaccgggaggtggtgaattacaacatgccaaaagaggtaatgtttatgtccagcgtgtttatgaggggtcgccacttaatctacctgcgcttgtggtatgatggccacgtgggttctgtggtccccgccatgagctttggatacagcgccttgcactgtgggattttgaacaatattgtggtgctgtgctgcagttactgtgctgatttaagtgagatcagggtgcgctgctgtgcccggaggacaaggcgccttatgctgcgggcggtgcgaatcatcgctgaggagaccactgccatgttgtattcctgcaggacggagcggcggcggcagcagtttattcgcgcgctgctgcagcaccaccgccctatcctgatgcacgattatgactctacccccatgtagaagcttggggatcaattctctagagctcgctgatcagcctcgactgtgccttctagttgccagccatctgttgtttgcccctcccccgtgccttccttgaccctggaaggtgccactcccactgtcctttcctaataaaatgaggaaattgcatcgcattgtctgagtaggtgtcattctattctggggggtggggtggggcaggacagcaagggggaggattgggaagacaatagcaggcatgctggggatgcggtgggctctatggcttctgaggaaattgggcgtggcttaagggtgggaaagaatatataaggtgggggtcttatgtagttttgtatctgttttgcagcagccgccgccgccatgagcaccaactcgtttgatggaagcattgtgagctcatatttgacaacgcgcatgcccccatgggccggggtgcgtcagaatgtgatgggctccagcattgatggtcgccccgtcctgcccgcaaactctactaccttgacctacgagaccgtgtctggaacgccgttggagactgcagcctccgccgccgcttcagccgctgcagccaccgcccgcgggattgtgactgactttgctttcctgagcccgcttgcaagcagtgcagcttcccgttcatccgcccgcgatgacaagttgacggctcttttggcacaattggattctttgacccgggaacttaatgtcgtttctcagcagctgttggatctgcgccagcaggtttctgccctgaaggcttcctcccctcccaatgcggtttaaaacataaataaaaaaccagactctgtttggatttggatcaagcaagtgtcttgctgtctttatttaggggttttgcgcgcgcggtaggcccgggaccagcggtctcggtcgttgagggtcctgtgtattttttccaggacgtggtaaaggtgactctggatgttcagatacatgggcataagcccgtctctggggtggaggtagcaccactgcagagcttcatgctgcggggtggtgttgtagatgatccagtcgtagcaggagcgctgggcgtggtgcctaaaaatgtctttcagtagcaagctgattgccaggggcaggcccttggtgtaagtgtttacaaagcggttaagctgggatgggtgcatacgtggggatatgagatgcatcttggactgtatttttaggttggctatgttcccagccatatccctccggggattcatgttgtgcagaaccaccagcacagtgtatccggtgcacttgggaaatttgtcatgtagcttagaaggaaatgcgtggaagaacttggagacgcccttgtgacctccaagattttccatgcattcgtccataatgatggcaatgggcccacgggcggcggcctgggcgaagatatttctgggatcactaacgtcatagttgtgttccaggatgagatcgtcataggccatttttacaaagcgcgggcggagggtgccagactgcggtataatggttccatccggcccaggggcgtagttaccctcacagatttgcatttcccacgctttgagttcagatggggggatcatgtctacctgcggggcgatgaagaaaacggtttccggggtaggggagatcagctgggaagaaagcaggttcctgagcagctgcgacttaccgcagccggtgggcccgtaaatcacacctattaccgggtgcaactggtagttaagagagctgcagctgccgtcatccctgagcaggggggccacttcgttaagcatgtccctgactcgcatgttttccctgaccaaatccgccagaaggcgctcgccgcccagcgatagcagttcttgcaaggaagcaaagtttttcaacggtttgagaccgtccgccgtaggcatgcttttgagcgtttgaccaagcagttccaggcggtcccacagctcggtcacctgctctacggcatctcgatccagcatatctcctcgtttcgcgggttggggcggctttcgctgtacggcagtagtcggtgctcgtccagacgggccagggtcatgtctttccacgggcgcagggtcctcgtcagcgtagtctgggtcacggtgaaggggtgcgctccgggctgcgcgctggccagggtgcgcttgaggctggtcctgctggtgctgaagcgctgccggtcttcgccctgcgcgtcggccaggtagcatttgaccatggtgtcatagtccagcccctccgcggcgtggcccttggcgcgcagcttgcccttggaggaggcgccgcacgaggggcagtgcagacttttgagggcgtagagcttgggcgcgagaaataccgattccggggagtaggcatccgcgccgcaggccccgcagacggtctcgcattccacgagccaggtgagctctggccgttcggggtcaaaaaccaggtttcccccatgctttttgatgcgtttcttacctctggtttccatgagccggtgtccacgctcggtgacgaaaaggctgtccgtgtccccgtatacagacttgagaggcctgtcctcgagcggtgttccgcggtcctcctcgtatagaaactcggaccactctgagacaaaggctcgcgtccaggccagcacgaaggaggctaagtgggaggggtagcggtcgttgtccactagggggtccactcgctccagggtgtgaagacacatgtcgccctcttcggcatcaaggaaggtgattggtttgtaggtgtaggccacgtgaccgggtgttcctgaaggggggctataaaagggggtgggggcgcgttcgtcctcactctcttccgcatcgctgtctgcgagggccagctgttggggtgagtactccctctgaaaagcgggcatgacttctgcgctaagattgtcagtttccaaaaacgaggaggatttgatattcacctggcccgcggtgatgcctttgagggtggccgcatccatctggtcagaaaagacaatctttttgttgtcaagcttggtggcaaacgacccgtagagggcgttggacagcaacttggcgatggagcgcagggtttggtttttgtcgcgatcggcgcgctccttggccgcgatgtttagctgcacgtattcgcgcgcaacgcaccgccattcgggaaagacggtggtgcgctcgtcgggcaccaggtgcacgcgccaaccgcggttgtgcagggtgacaaggtcaacgctggtggctacctctccgcgtaggcgctcgttggtccagcagaggcggccgcccttgcgcgagcagaatggcggtagggggtctagctgcgtctcgtccggggggtctgcgtccacggtaaagaccccgggcagcaggcgcgcgtcgaagtagtctatcttgcatccttgcaagtctagcgcctgctgccatgcgcgggcggcaagcgcgcgctcgtatgggttgagtgggggaccccatggcatggggtgggtgagcgcggaggcgtacatgccgcaaatgtcgtaaacgtagaggggctctctgagtattccaagatatgtagggtagcatcttccaccgcggatgctggcgcgcacgtaatcgtatagttcgtgcgagggagcgaggaggtcgggaccgaggttgctacgggcgggctgctctgctcggaagactatctgcctgaagatggcatgtgagttggatgatatggttggacgctggaagacgttgaagctggcgtctgtgagacctaccgcgtcacgcacgaaggaggcgtaggagtcgcgcagcttgttgaccagctcggcggtgacctgcacgtctagggcgcagtagtccagggtttccttgatgatgtcatacttatcctgtcccttttttttccacagctcgcggttgaggacaaactcttcgcggtctttccagtactcttggatcggaaacccgtcggcctccgaacggtaagagcctagcatgtagaactggttgacggcctggtaggcgcagcatcccttttctacgggtagcgcgtatgcctgcgcggccttccggagcgaggtgtgggtgagcgcaaaggtgtccctgaccatgactttgaggtactggtatttgaagtcagtgtcgtcgcatccgccctgctcccagagcaaaaagtccgtgcgctttttggaacgcggatttggcagggcgaaggtgacatcgttgaagagtatctttcccgcgcgaggcataaagttgcgtgtgatgcggaagggtcccggcacctcggaacggttgttaattacctgggcggcgagcacgatctcgtcaaagccgttgatgttgtggcccacaatgtaaagttccaagaagcgcgggatgcccttgatggaaggcaattttttaagttcctcgtaggtgagctcttcaggggagctgagcccgtgctctgaaagggcccagtctgcaagatgagggttggaagcgacgaatgagctccacaggtcacgggccattagcatttgcaggtggtcgcgaaaggtcctaaactggcgacctatggccattttttctggggtgatgcagtagaaggtaagcgggtcttgttcccagcggtcccatccaaggttcgcggctaggtctcgcgcggcagtcactagaggctcatctccgccgaacttcatgaccagcatgaagggcacgagctgcttcccaaaggcccccatccaagtataggtctctacatcgtaggtgacaaagagacgctcggtgcgaggatgcgagccgatcgggaagaactggatctcccgccaccaattggaggagtggctattgatgtggtgaaagtagaagtccctgcgacgggccgaacactcgtgctggcttttgtaaaaacgtgcgcagtactggcagcggtgcacgggctgtacatcctgcacgaggttgacctgacgaccgcgcacaaggaagcagagtgggaatttgagcccctcgcctggcgggtttggctggtggtcttctacttcggctgcttgtccttgaccgtctggctgctcgaggggagttacggtggatcggaccaccacgccgcgcgagcccaaagtccagatgtccgcgcgcggcggtcggagcttgatgacaacatcgcgcagatgggagctgtccatggtctggagctcccgcggcgtcaggtcaggcgggagctcctgcaggtttacctcgcatagacgggtcagggcgcgggctagatccaggtgatacctaatttccaggggctggttggtggcggcgtcgatggcttgcaagaggccgcatccccgcggcgcgactacggtaccgcgcggcgggcggtgggccgcgggggtgtccttggatgatgcatctaaaagcggtgacgcgggcgagcccccggaggtagggggggctccggacccgccgggagagggggcaggggcacgtcggcgccgcgcgcgggcaggagctggtgctgcgcgcgtaggttgctggcgaacgcgacgacgcggcggttgatctcctgaatctggcgcctctgcgtgaagacgacgggcccggtgagcttgaacctgaaagagagttcgacagaatcaatttcggtgtcgttgacggcggcctggcgcaaaatctcctgcacgtctcctgagttgtcttgataggcgatctcggccatgaactgctcgatctcttcctcctggagatctccgcgtccggctcgctccacggtggcggcgaggtcgttggaaatgcgggccatgagctgcgagaaggcgttgaggcctccctcgttccagacgcggctgtagaccacgcccccttcggcatcgcgggcgcgcatgaccacctgcgcgagattgagctccacgtgccgggcgaagacggcgtagtttcgcaggcgctgaaagaggtagttgagggtggtggcggtgtgttctgccacgaagaagtacataacccagcgtcgcaacgtggattcgttgatatcccccaaggcctcaaggcgctccatggcctcgtagaagtccacggcgaagttgaaaaactgggagttgcgcgccgacacggttaactcctcctccagaagacggatgagctcggcgacagtgtcgcgcacctcgcgctcaaaggctacaggggcctcttcttcttcttcaatctcctcttccataagggcctccccttcttcttcttctggcggcggtgggggaggggggacacggcggcgacgacggcgcaccgggaggcggtcgacaaagcgctcgatcatctccccgcggcgacggcgcatggtctcggtgacggcgcggccgttctcgcgggggcgcagttggaagacgccgcccgtcatgtcccggttatgggttggcggggggctgccatgcggcagggatacggcgctaacgatgcatctcaacaattgttgtgtaggtactccgccgccgagggacctgagcgagtccgcatcgaccggatcggaaaacctctcgagaaaggcgtctaaccagtcacagtcgcaaggtaggctgagcaccgtggcgggcggcagcgggcggcggtcggggttgtttctggcggaggtgctgctgatgatgtaattaaagtaggcggtcttgagacggcggatggtcgacagaagcaccatgtccttgggtccggcctgctgaatgcgcaggcggtcggccatgccccaggcttcgttttgacatcggcgcaggtctttgtagtagtcttgcatgagcctttctaccggcacttcttcttctccttcctcttgtcctgcatctcttgcatctatcgctgcggcggcggcggagtttggccgtaggtggcgccctcttcctcccatgcgtgtgaccccgaagcccctcatcggctgaagcagggctaggtcggcgacaacgcgctcggctaatatggcctgctgcacctgcgtgagggtagactggaagtcatccatgtccacaaagcggtggtatgcgcccgtgttgatggtgtaagtgcagttggccataacggaccagttaacggtctggtgacccggctgcgagagctcggtgtacctgagacgcgagtaagccctcgagtcaaatacgtagtcgttgcaagtccgcaccaggtactggtatcccaccaaaaagtgcggcggcggctggcggtagaggggccagcgtagggtggccggggctccgggggcgagatcttccaacataaggcgatgatatccgtagatgtacctggacatccaggtgatgccggcggcggtggtggaggcgcgcggaaagtcgcggacgcggttccagatgttgcgcagcggcaaaaagtgctccatggtcgggacgctctggccggtcaggcgcgcgcaatcgttgacgctctagcgtgcaaaaggagagcctgtaagcgggcactcttccgtggtctggtggataaattcgcaagggtatcatggcggacgaccggggttcgagccccgtatccggccgtccgccgtgatccatgcggttaccgcccgcgtgtcgaacccaggtgtgcgacgtcagacaacgggggagtgctccttttggcttccttccaggcgcggcggctgctgcgctagcttttttggccactggccgcgcgcagcgtaagcggttaggctggaaagcgaaagcattaagtggctcgctccctgtagccggagggttattttccaagggttgagtcgcgggacccccggttcgagtctcggaccggccggactgcggcgaacgggggtttgcctccccgtcatgcaagaccccgcttgcaaattcctccggaaacagggacgagccccttttttgcttttcccagatgcatccggtgctgcggcagatgcgcccccctcctcagcagcggcaagagcaagagcagcggcagacatgcagggcaccctcccctcctcctaccgcgtcaggaggggcgacatccgcggttgacgcggcagcagatggtgattacgaacccccgcggcgccgggcccggcactacctggacttggaggagggcgagggcctggcgcggctaggagcgccctctcctgagcggcacccaagggtgcagctgaagcgtgatacgcgtgaggcgtacgtgccgcggcagaacctgtttcgcgaccgcgagggagaggagcccgaggagatgcgggatcgaaagttccacgcagggcgcgagctgcggcatggcctgaatcgcgagcggttgctgcgcgaggaggactttgagcccgacgcgcgaaccgggattagtcccgcgcgcgcacacgtggcggccgccgacctggtaaccgcatacgagcagacggtgaaccaggagattaactttcaaaaaagctttaacaaccacgtgcgtacgcttgtggcgcgcgaggaggtggctataggactgatgcatctgtgggactttgtaagcgcgctggagcaaaacccaaatagcaagccgctcatggcgcagctgttccttatagtgcagcacagcagggacaacgaggcattcagggatgcgctgctaaacatagtagagcccgagggccgctggctgctcgatttgataaacatcctgcagagcatagtggtgcaggagcgcagcttgagcctggctgacaaggtggccgccatcaactattccatgcttagcctgggcaagttttacgcccgcaagatataccataccccttacgttcccatagacaaggaggtaaagatcgaggggttctacatgcgcatggcgctgaaggtgcttaccttgagcgacgacctgggcgtttatcgcaacgagcgcatccacaaggccgtgagcgtgagccggcggcgcgagctcagcgaccgcgagctgatgcacagcctgcaaagggccctggctggcacgggcagcggcgatagagaggccgagtcctactttgacgcgggcgctgacctgcgctgggccccaagccgacgcgccctggaggcagctggggccggacctgggctggcggtggcacccgcgcgcgctggcaacgtcggcggcgtggaggaatatgacgaggacgatgagtacgagccagaggacggcgagtactaagcggtgatgtttctgatcagatgatgcaagacgcaacggacccggcggtgcgggcggcgctgcagagccagccgtccggccttaactccacggacgactggcgccaggtcatggaccgcatcatgtcgctgactgcgcgcaatcctgacgcgttccggcagcagccgcaggccaaccggctctccgcaattctggaagcggtggtcccggcgcgcgcaaaccccacgcacgagaaggtgctggcgatcgtaaacgcgctggccgaaaacagggccatccggcccgacgaggccggcctggtctacgacgcgctgcttcagcgcgtggctcgttacaacagcggcaacgtgcagaccaacctggaccggctggtgggggatgtgcgcgaggccgtggcgcagcgtgagcgcgcgcagcagcagggcaacctgggctccatggttgcactaaacgccttcctgagtacacagcccgccaacgtgccgcggggacaggaggactacaccaactttgtgagcgcactgcggctaatggtgactgagacaccgcaaagtgaggtgtaccagtctgggccagactattttttccagaccagtagacaaggcctgcagaccgtaaacctgagccaggctttcaaaaacttgcaggggctgtggggggtgcgggctcccacaggcgaccgcgcgaccgtgtctagcttgctgacgcccaactcgcgcctgttgctgctgctaatagcgcccttcacggacagtggcagcgtgtcccgggacacatacctaggtcacttgctgacactgtaccgcgaggccataggtcaggcgcatgtggacgagcatactttccaggagattacaagtgtcagccgcgcgctggggcaggaggacacgggcagcctggaggcaaccctaaactacctgctgaccaaccggcggcagaagatcccctcgttgcacagtttaaacagcgaggaggagcgcattttgcgctacgtgcagcagagcgtgagccttaacctgatgcgcgacggggtaacgcccagcgtggcgctggacatgaccgcgcgcaacatggaaccgggcatgtatgcctcaaaccggccgtttatcaaccgcctaatggactacttgcatcgcgcggccgccgtgaaccccgagtatttcaccaatgccatcttgaacccgcactggctaccgccccctggtttctacaccgggggattcgaggtgcccgagggtaacgatggattcctctgggacgacatagacgacagcgtgttttccccgcaaccgcagaccctgctagagttgcaacagcgcgagcaggcagaggcggcgctgcgaaaggaaagcttccgcaggccaagcagcttgtccgatctaggcgctgcggccccgcggtcagatgctagtagcccatttccaagcttgatagggtctcttaccagcactcgcaccacccgcccgcgcctgctgggcgaggaggagtacctaaacaactcgctgctgcagccgcagcgcgaaaaaaacctgcctccggcatttcccaacaacgggatagagagcctagtggacaagatgagtagatggaagacgtacgcgcaggagcacagggacgtgccaggcccgcgcccgcccacccgtcgtcaaaggcacgaccgtcagcggggtctggtgtgggaggacgatgactcggcagacgacagcagcgtcctggatttgggagggagtggcaacccgtttgcgcaccttcgccccaggctggggagaatgttttaaaaaaaaaaaagcatgatgcaaaataaaaaactcaccaaggccatggcaccgagcgttggttttcttgtattccccttagtatgcggcgcgcggcgatgtatgaggaaggtcctcctccctcctacgagagtgtggtgagcgcggcgccagtggcggcggcgctgggttctcccttcgatgctcccctggacccgccgtttgtgcctccgcggtacctgcggcctaccggggggagaaacagcatccgttactctgagttggcacccctattcgacaccacccgtgtgtacctggtggacaacaagtcaacggatgtggcatccctgaactaccagaacgaccacagcaactttctgaccacggtcattcaaaacaatgactacagcccgggggaggcaagcacacagaccatcaatcttgacgaccggtcgcactggggcggcgacctgaaaaccatcctgcataccaacatgccaaatgtgaacgagttcatgtttaccaataagtttaaggcgcgggtgatggtgtcgcgcttgcctactaaggacaatcaggtggagctgaaatacgagtgggtggagttcacgctgcccgagggcaactactccgagaccatgaccatagaccttatgaacaacgcgatcgtggagcactacttgaaagtgggcagacagaacggggttctggaaagcgacatcggggtaaagtttgacacccgcaacttcagactggggtttgaccccgtcactggtcttgtcatgcctggggtatatacaaacgaagccttccatccagacatcattttgctgccaggatgcggggtggacttcacccacagccgcctgagcaacttgttgggcatccgcaagcggcaacccttccaggagggctttaggatcacctacgatgatctggagggtggtaacattcccgcactgttggatgtggacgcctaccaggcgagcttgaaagatgacaccgaacagggcgggggtggcgcaggcggcagcaacagcagtggcagcggcgcggaagagaactccaacgcggcagccgcggcaatgcagccggtggaggacatgaacgatcatgccattcgcggcgacacctttgccacacgggctgaggagaagcgcgctgaggccgaagcagcggccgaagctgccgcccccgctgcgcaacccgaggtcgagaagcctcagaagaaaccggtgatcaaacccctgacagaggacagcaagaaacgcagttacaacctaataagcaatgacagcaccttcacccagtaccgcagctggtaccttgcatacaactacggcgaccctcagaccggaatccgctcatggaccctgctttgcactcctgacgtaacctgcggctcggagcaggtctactggtcgttgccagacatgatgcaagaccccgtgaccttccgctccacgcgccagatcagcaactttccggtggtgggcgccgagctgttgcccgtgcactccaagagcttctacaacgaccaggccgtctactcccaactcatccgccagtttacctctctgacccacgtgttcaatcgctttcccgagaaccagattttggcgcgcccgccagcccccaccatcaccaccgtcagtgaaaacgttcctgctctcacagatcacgggacgctaccgctgcgcaacagcatcggaggagtccagcgagtgaccattactgacgccagacgccgcacctgcccctacgtttacaaggccctgggcatagtctcgccgcgcgtcctatcgagccgcactttttgagcaagcatgtccatccttatatcgcccagcaataacacaggctggggcctgcgcttcccaagcaagatgtttggcggggccaagaagcgctccgaccaacacccagtgcgcgtgcgcgggcactaccgcgcgccctggggcgcgcacaaacgcggccgcactgggcgcaccaccgtcgatgacgccatcgacgcggtggtggaggaggcgcgcaactacacgcccacgccgccaccagtgtccacagtggacgcggccattcagaccgtggtgcgcggagcccggcgctatgctaaaatgaagagacggcggaggcgcgtagcacgtcgccaccgccgccgacccggcactgccgcccaacgcgcggcggcggccctgcttaaccgcgcacgtcgcaccggccgacgggcggccatgcgggccgctcgaaggctggccgcgggtattgtcactgtgccccccaggtccaggcgacgagcggccgccgcagcagccgcggccattagtgctatgactcagggtcgcaggggcaacgtgtattgggtgcgcgactcggttagcggcctgcgcgtgcccgtgcgcacccgccccccgcgcaactagattgcaagaaaaaactacttagactcgtactgttgtatgtatccagcggcggcggcgcgcaacgaagctatgtccaagcgcaaaatcaaagaagagatgctccaggtcatcgcgccggagatctatggccccccgaagaaggaagagcaggattacaagccccgaaagctaaagcgggtcaaaaagaaaaagaaagatgatgatgatgaacttgacgacgaggtggaactgctgcacgctaccgcgcccaggcgacgggtacagtggaaaggtcgacgcgtaaaacgtgttttgcgacccggcaccaccgtagtctttacgcccggtgagcgctccacccgcacctacaagcgcgtgtatgatgaggtgtacggcgacgaggacctgcttgagcaggccaacgagcgcctcggggagtttgcctacggaaagcggcataaggacatgctggcgttgccgctggacgagggcaacccaacacctagcctaaagcccgtaacactgcagcaggtgctgcccgcgcttgcaccgtccgaagaaaagcgcggcctaaagcgcgagtctggtgacttggcacccaccgtgcagctgatggtacccaagcgccagcgactggaagatgtcttggaaaaaatgaccgtggaacctgggctggagcccgaggtccgcgtgcggccaatcaagcaggtggcgccgggactgggcgtgcagaccgtggacgttcagatacccactaccagtagcaccagtattgccaccgccacagagggcatggagacacaaacgtccccggttgcctcagcggtggcggatgccgcggtgcaggcggtcgctgcggccgcgtccaagacctctacggaggtgcaaacggacccgtggatgtttcgcgtttcagccccccggcgcccgcgccgttcgaggaagtacggcgccgccagcgcgctactgcccgaatatgccctacatccttccattgcgcctacccccggctatcgtggctacacctaccgccccagaagacgagcaactacccgacgccgaaccaccactggaacccgccgccgccgtcgccgtcgccagcccgtgctggccccgatttccgtgcgcagggtggctcgcgaaggaggcaggaccctggtgctgccaacagcgcgctaccaccccagcatcgtttaaaagccggtctttgtggttcttgcagatatggccctcacctgccgcctccgtttcccggtgccgggattccgaggaagaatgcaccgtaggaggggcatggccggccacggcctgacgggcggcatgcgtcgtgcgcaccaccggcggcggcgcgcgtcgcaccgtcgcatgcgcggcggtatcctgcccctccttattccactgatcgccgcggcgattggcgccgtgcccggaattgcatccgtggccttgcaggcgcagagacactgattaaaaacaagttgcatgtggaaaaatcaaaataaaaagtctggactctcacgctcgcttggtcctgtaactattttgtagaatggaagacatcaactttgcgtctctggccccgcgacacggctcgcgcccgttcatgggaaactggcaagatatcggcaccagcaatatgagcggtggcgccttcagctggggctcgctgtggagcggcattaaaaatttcggttccaccgttaagaactatggcagcaaggcctggaacagcagcacaggccagatgctgagggataagttgaaagagcaaaatttccaacaaaaggtggtagatggcctggcctctggcattagcggggtggtggacctggccaaccaggcagtgcaaaataagattaacagtaagcttgatccccgccctcccgtagaggagcctccaccggccgtggagacagtgtctccagaggggcgtggcgaaaagcgtccgcgccccgacagggaagaaactctggtgacgcaaatagacgagcctccctcgtacgaggaggcactaaagcaaggcctgcccaccacccgtcccatcgcgcccatggctaccggagtgctgggccagcacacacccgtaacgctggacctgcctccccccgccgacacccagcagaaacctgtgctgccaggcccgaccgccgttgttgtaacccgtcctagccgcgcgtccctgcgccgcgccgccagcggtccgcgatcgttgcggcccgtagccagtggcaactggcaaagcacactgaacagcatcgtgggtctgggggtgcaatccctgaagcgccgacgatgcttctgatagctaacgtgtcgtatgtgtgtcatgtatgcgtccatgtcgccgccagaggagctgctgagccgccgcgcgcccgctttccaagatggctaccccttcgatgatgccgcagtggtcttacatgcacatctcgggccaggacgcctcggagtacctgagccccgggctggtgcagtttgcccgcgccaccgagacgtacttcagcctgaataacaagtttagaaaccccacggtggcgcctacgcacgacgtgaccacagaccggtcccagcgtttgacgctgcggttcatccctgtggaccgtgaggatactgcgtactcgtacaaggcgcggttcaccctagctgtgggtgataaccgtgtgctggacatggcttccacgtactttgacatccgcggcgtgctggacaggggccctacttttaagccctactctggcactgcctacaacgccctggctcccaagggtgccccaaatccttgcgaatgggatgaagctgctactgctcttgaaataaacctagaagaagaggacgatgacaacgaagacgaagtagacgagcaagctgagcagcaaaaaactcacgtatttgggcaggcgccttattctggtataaatattacaaaggagggtattcaaataggtgtcgaaggtcaaacacctaaatatgccgataaaacatttcaacctgaacctcaaataggagaatctcagtggtacgaaacagaaattaatcatgcagctgggagagtcctaaaaaagactaccccaatgaaaccatgttacggttcatatgcaaaacccacaaatgaaaatggagggcaaggcattcttgtaaagcaacaaaatggaaagctagaaagtcaagtggaaatgcaatttttctcaactactgaggcagccgcaggcaatggtgataacttgactcctaaagtggtattgtacagtgaagatgtagatatagaaaccccagacactcatatttcttacatgcccactattaaggaaggtaactcacgagaactaatgggccaacaatctatgcccaacaggcctaattacattgcttttagggacaattttattggtctaatgtattacaacagcacgggtaatatgggtgttctggcgggccaagcatcgcagttgaatgctgttgtagatttgcaagacagaaacacagagctttcataccagcttttgcttgattccattggtgatagaaccaggtacttttctatgtggaatcaggctgttgacagctatgatccagatgttagaattattgaaaatcatggaactgaagatgaacttccaaattactgctttccactgggaggtgtgattaatacagagactcttaccaaggtaaaacctaaaacaggtcaggaaaatggatgggaaaaagatgctacagaattttcagataaaaatgaaataagagttggaaataattttgccatggaaatcaatctaaatgccaacctgtggagaaatttcctgtactccaacatagcgctgtatttgcccgacaagctaaagtacagtccttccaacgtaaaaatttctgataacccaaacacctacgactacatgaacaagcgagtggtggctcccgggctagtggactgctacattaaccttggagcacgctggtcccttgactatatggacaacgtcaacccatttaaccaccaccgcaatgctggcctgcgctaccgctcaatgttgctgggcaatggtcgctatgtgcccttccacatccaggtgcctcagaagttctttgccattaaaaacctccttctcctgccgggctcatacacctacgagtggaacttcaggaaggatgttaacatggttctgcagagctccctaggaaatgacctaagggttgacggagccagcattaagtttgatagcatttgcctttacgccaccttcttccccatggcccacaacaccgcctccacgcttgaggccatgcttagaaacgacaccaacgaccagtcctttaacgactatctctccgccgccaacatgctctaccctatacccgccaacgctaccaacgtgcccatatccatcccctcccgcaactgggcggctttccgcggctgggccttcacgcgccttaagactaaggaaaccccatcactgggctcgggctacgacccttattacacctactctggctctataccctacctagatggaaccttttacctcaaccacacctttaagaaggtggccattacctttgactcttctgtcagctggcctggcaatgaccgcctgcttacccccaacgagtttgaaattaagcgctcagttgacggggagggttacaacgttgcccagtgtaacatgaccaaagactggttcctggtacaaatgctagctaactataacattggctaccagggcttctatatcccagagagctacaaggaccgcatgtactccttctttagaaacttccagcccatgagccgtcaggtggtggatgatactaaatacaaggactaccaacaggtgggcatcctacaccaacacaacaactctggatttgttggctaccttgcccccaccatgcgcgaaggacaggcctaccctgctaacttcccctatccgcttataggcaagaccgcagttgacagcattacccagaaaaagtttctttgcgatcgcaccctttggcgcatcccattctccagtaactttatgtccatgggcgcactcacagacctgggccaaaaccttctctacgccaactccgcccacgcgctagacatgacttttgaggtggatcccatggacgagcccacccttctttatgttttgtttgaagtctttgacgtggtccgtgtgcaccagccgcaccgcggcgtcatcgaaaccgtgtacctgcgcacgcccttctcggccggcaacgccacaacataaagaagcaagcaacatcaacaacagctgccgccatgggctccagtgagcaggaactgaaagccattgtcaaagatcttggttgtgggccatattttttgggcacctatgacaagcgctttccaggctttgtttctccacacaagctcgcctgcgccatagtcaatacggccggtcgcgagactgggggcgtacactggatggcctttgcctggaacccgcactcaaaaacatgctacctctttgagccctttggcttttctgaccagcgactcaagcaggtttaccagtttgagtacgagtcactcctgcgccgtagcgccattgcttcttcccccgaccgctgtataacgctggaaaagtccacccaaagcgtacaggggcccaactcggccgcctgtggactattctgctgcatgtttctccacgcctttgccaactggccccaaactcccatggatcacaaccccaccatgaaccttattaccggggtacccaactccatgctcaacagtccccaggtacagcccaccctgcgtcgcaaccaggaacagctctacagcttcctggagcgccactcgccctacttccgcagccacagtgcgcagattaggagcgccacttctttttgtcacttgaaaaacatgtaaaaataatgtactagagacactttcaataaaggcaaatgcttttatttgtacactctcgggtgattatttacccccacccttgccgtctgcgccgtttaaaaatcaaaggggttctgccgcgcatcgctatgcgccactggcagggacacgttgcgatactggtgtttagtgctccacttaaactcaggcacaaccatccgcggcagctcggtgaagttttcactccacaggctgcgcaccatcaccaacgcgtttagcaggtcgggcgccgatatcttgaagtcgcagttggggcctccgccctgcgcgcgcgagttgcgatacacagggttgcagcactggaacactatcagcgccgggtggtgcacgctggccagcacgctcttgtcggagatcagatccgcgtccaggtcctccgcgttgctcagggcgaacggagtcaactttggtagctgccttcccaaaaagggcgcgtgcccaggctttgagttgcactcgcaccgtagtggcatcaaaaggtgaccgtgcccggtctgggcgttaggatacagcgcctgcataaaagccttgatctgcttaaaagccacctgagcctttgcgccttcagagaagaacatgccgcaagacttgccggaaaactgattggccggacaggccgcgtcgtgcacgcagcaccttgcgtcggtgttggagatctgcaccacatttcggccccaccggttcttcacgatcttggccttgctagactgctccttcagcgcgcgctgcccgttttcgctcgtcacatccatttcaatcacgtgctccttatttatcataatgcttccgtgtagacacttaagctcgccttcgatctcagcgcagcggtgcagccacaacgcgcagcccgtgggctcgtgatgcttgtaggtcacctctgcaaacgactgcaggtacgcctgcaggaatcgccccatcatcgtcacaaaggtcttgttgctggtgaaggtcagctgcaacccgcggtgctcctcgttcagccaggtcttgcatacggccgccagagcttccacttggtcaggcagtagtttgaagttcgcctttagatcgttatccacgtggtacttgtccatcagcgcgcgcgcagcctccatgcccttctcccacgcagacacgatcggcacactcagcgggttcatcaccgtaatttcactttccgcttcgctgggctcttcctcttcctcttgcgtccgcataccacgcgccactgggtcgtcttcattcagccgccgcactgtgcgcttacctcctttgccatgcttgattagcaccggtgggttgctgaaacccaccatttgtagcgccacatcttctctttcttcctcgctgtccacgattacctctggtgatggcgggcgctcgggcttgggagaagggcgcttctttttcttcttgggcgcaatggccaaatccgccgccgaggtcgatggccgcgggctgggtgtgcgcggcaccagcgcgtcttgtgatgagtcttcctcgtcctcggactcgatacgccgcctcatccgcttttttgggggcgcccggggaggcggcggcgacggggacggggacgacacgtcctccatggttgggggacgtcgcgccgcaccgcgtccgcgctcgggggtggtttcgcgctgctcctcttcccgactggccatttccttctcctataggcagaaaaagatcatggagtcagtcgagaagaaggacagcctaaccgccccctctgagttcgccaccaccgcctccaccgatgccgccaacgcgcctaccaccttccccgtcgaggcacccccgcttgaggaggaggaagtgattatcgagcaggacccaggttttgtaagcgaagacgacgaggaccgctcagtaccaacagaggataaaaagcaagaccaggacaacgcagaggcaaacgaggaacaagtcgggcggggggacgaaaggcatggcgactacctagatgtgggagacgacgtgctgttgaagcatctgcagcgccagtgcgccattatctgcgacgcgttgcaagagcgcagcgatgtgcccctcgccatagcggatgtcagccttgcctacgaacgccacctattctcaccgcgcgtaccccccaaacgccaagaaaacggcacatgcgagcccaacccgcgcctcaacttctaccccgtatttgccgtgccagaggtgcttgccacctatcacatctttttccaaaactgcaagatacccctatcctgccgtgccaaccgcagccgagcggacaagcagctggccttgcggcagggcgctgtcatacctgatatcgcctcgctcaacgaagtgccaaaaatctttgagggtcttggacgcgacgagaagcgcgcggcaaacgctctgcaacaggaaaacagcgaaaatgaaagtcactctggagtgttggtggaactcgagggtgacaacgcgcgcctagccgtactaaaacgcagcatcgaggtcacccactttgcctacccggcacttaacctaccccccaaggtcatgagcacagtcatgagtgagctgatcgtgcgccgtgcgcagcccctggagagggatgcaaatttgcaagaacaaacagaggagggcctacccgcagttggcgacgagcagctagcgcgctggcttcaaacgcgcgagcctgccgacttggaggagcgacgcaaactaatgatggccgcagtgctcgttaccgtggagcttgagtgcatgcagcggttctttgctgacccggagatgcagcgcaagctagaggaaacattgcactacacctttcgacagggctacgtacgccaggcctgcaagatctccaacgtggagctctgcaacctggtctcctaccttggaattttgcacgaaaaccgccttgggcaaaacgtgcttcattccacgctcaagggcgaggcgcgccgcgactacgtccgcgactgcgtttacttatttctatgctacacctggcagacggccatgggcgtttggcagcagtgcttggaggagtgcaacctcaaggagctgcagaaactgctaaagcaaaacttgaaggacctatggacggccttcaacgagcgctccgtggccgcgcacctggcggacatcattttccccgaacgcctgcttaaaaccctgcaacagggtctgccagacttcaccagtcaaagcatgttgcagaactttaggaactttatcctagagcgctcaggaatcttgcccgccacctgctgtgcacttcctagcgactttgtgcccattaagtaccgcgaatgccctccgccgctttggggccactgctaccttctgcagctagccaactaccttgcctaccactctgacataatggaagacgtgagcggtgacggtctactggagtgtcactgtcgctgcaacctatgcaccccgcaccgctccctggtttgcaattcgcagctgcttaacgaaagtcaaattatcggtacctttgagctgcagggtccctcgcctgacgaaaagtccgcggctccggggttgaaactcactccggggctgtggacgtcggcttaccttcgcaaatttgtacctgaggactaccacgcccacgagattaggttctacgaagaccaatcccgcccgcctaatgcggagcttaccgcctgcgtcattacccagggccacattcttggccaattgcaagccatcaacaaagcccgccaagagtttctgctacgaaagggacggggggtttacttggacccccagtccggcgaggagctcaacccaatccccccgccgccgcagccctatcagcagcagccgcgggcccttgcttcccaggatggcacccaaaaagaagctgcagctgccgccgccacccacggacgaggaggaatactgggacagtcaggcagaggaggttttggacgaggaggaggaggacatgatggaagactgggagagcctagacgaggaagcttccgaggtcgaagaggtgtcagacgaaacaccgtcaccctcggtcgcattcccctcgccggcgccccagaaatcggcaaccggttccagcatggctacaacctccgctcctcaggcgccgccggcactgcccgttcgccgacccaaccgtagatgggacaccactggaaccagggccggtaagtccaagcagccgccgccgttagcccaagagcaacaacagcgccaaggctaccgctcatggcgcgggcacaagaacgccatagttgcttgcttgcaagactgtgggggcaacatctccttcgcccgccgctttcttctctaccatcacggcgtggccttcccccgtaacatcctgcattactaccgtcatctctacagcccatactgcaccggcggcagcggcagcaacagcagcggccacacagaagcaaaggcgaccggatagcaagactctgacaaagcccaagaaatccacagcggcggcagcagcaggaggaggagcgctgcgtctggcgcccaacgaacccgtatcgacccgcgagcttagaaacaggatttttcccactctgtatgctatatttcaacagagcaggggccaagaacaagagctgaaaataaaaaacaggtctctgcgatccctcacccgcagctgcctgtatcacaaaagcgaagatcagcttcggcgcacgctggaagacgcggaggctctcttcagtaaatactgcgcgctgactcttaaggactagtttcgcgccctttctcaaatttaagcgcgaaaactacgtcatctccagcggccacacccggcgccagcacctgttgtcagcgccattatgagcaaggaaattcccacgccctacatgtggagttaccagccacaaatgggacttgcggctggagctgcccaagactactcaacccgaataaactacatgagcgcgggaccccacatgatatcccgggtcaacggaatacgcgcccaccgaaaccgaattctcctggaacaggcggctattaccaccacacctcgtaataaccttaatccccgtagttggcccgctgccctggtgtaccaggaaagtcccgctcccaccactgtggtacttcccagagacgcccaggccgaagttcagatgactaactcaggggcgcagcttgcgggcggctttcgtcacagggtgcggtcgcccgggcagggtataactcacctgacaatcagagggcgaggtattcagctcaacgacgagtcggtgagctcctcgcttggtctccgtccggacgggacatttcagatcggcggcgccggccgctcttcattcacgcctcgtcaggcaatcctaactctgcagacctcgtcctctgagccgcgctctggaggcattggaactctgcaatttattgaggagtttgtgccatcggtctactttaaccccttctcgggacctcccggccactatccggatcaatttattcctaactttgacgcggtaaaggactcggcggacggctacgactgaatgttaagtggagaggcagagcaactgcgcctgaaacacctggtccactgtcgccgccacaagtgctttgcccgcgactccggtgagttttgctactttgaattgcccgaggatcatatcgagggcccggcgcacggcgtccggcttaccgcccagggagagcttgcccgtagcctgattcgggagtttacccagcgccccctgctagttgagcgggacaggggaccctgtgttctcactgtgatttgcaactgtcctaaccctggattacatcaagatcctctagttaatgtcaggtcgcctaagtcgattaactagagtacccggggatcttattccctttaactaataaaaaaaaataataaagcatcacttacttaaaatcagttagcaaatttctgtccagtttattcagcagcacctccttgccctcctcccagctctggtattgcagcttcctcctggctgcaaactttctccacaatctaaatggaatgtcagtttcctcctgttcctgtccatccgcacccactatcttcatgttgttgcagatgaagcgcgcaagaccgtctgaagataccttcaaccccgtgtatccatatgacacggaaaccggtcctccaactgtgccttttcttactcctccctttgtatcccccaatgggtttcaagagagtccccctggggtactctctttgcgcctatccgaacctctagttacctccaatggcatgcttgcgctcaaaatgggcaacggcctctctctggacgaggccggcaaccttacctcccaaaatgtaaccactgtgagcccacctctcaaaaaaaccaagtcaaacataaacctggaaatatctgcacccctcacagttacctcagaagccctaactgtggctgccgccgcacctctaatggtcgcgggcaacacactcaccatgcaatcacaggccccgctaaccgtgcacgactccaaacttagcattgccacccaaggacccctcacagtgtcagaaggaaagctagccctgcaaacatcaggccccctcaccaccaccgatagcagtacccttactatcactgcctcaccccctctaactactgccactggtagcttgggcattgacttgaaagagcccatttatacacaaaatggaaaactaggactaaagtacggggctcctttgcatgtaacagacgacctaaacactttgaccgtagcaactggtccaggtgtgactattaataatacttccttgcaaactaaagttactggagccttgggttttgattcacaaggcaatatgcaacttaatgtagcaggaggactaaggattgattctcaaaacagacgccttatacttgatgttagttatccgtttgatgctcaaaaccaactaaatctaagactaggacagggccctctttttataaactcagcccacaacttggatattaactacaacaaaggcctttacttgtttacagcttcaaacaattccaaaaagcttgaggttaacctaagcactgccaaggggttgatgtttgacgctacagccatagccattaatgcaggagatgggcttgaatttggttcacctaatgcaccaaacacaaatcccctcaaaacaaaaattggccatggcctagaatttgattcaaacaaggctatggttcctaaactaggaactggccttagttttgacagcacaggtgccattacagtaggaaacaaaaataatgataagctaactttgtggaccggaataaaccctccacctaactgtcaaattgtggaaaacactaatacaaatgatggcaaacttactttagtattagtaaaaaatggagggcttgttaatggctacgtgtctctagttggtgtatcagacactgtgaaccaaatgttcacacaaaagacagcaaacatccaattaagattatattttgactcttctggaaatctattaactgaggaatcagacttaaaaattccacttaaaaataaatcttctacagcgaccagtgaaactgtagccagcagcaaagcctttatgccaagtactacagcttatcccttcaacaccactactagggatagtgaaaactacattcatggaatatgttactacatgactagttatgatagaagtctatttcccttgaacatttctataatgctaaacagccgtatgatttcttccaatgttgcctatgccatacaatttgaatggaatctaaatgcaagtgaatctccagaaagcaacatagctacgctgaccacatccccctttttcttttcttacattacagaagacgacaactaaagaatcgtttgtgttatgtttcaacgtgtttatttttcaattgcagaaaatttcaagtcatttttcattcagtagtatagccccaccaccacatagcttatacagatcaccgtaccttaatcaaactcacagaaccctagtattcaacctgccacctccctcccaacacacagagtacacagtcctttctccccggctggccttaaaaagcatcatatcatgggtaacagacatattcttaggtgttatattccacacggtttcctgtcgagccaaacgctcatcagtgatattaataaactccccgggcagctcacttaagttcatgtcgctgtccagctgctgagccacaggctgctgtccaacttgcggttgcttaacgggcggcgaaggagaagtccacgcgttgtgcattgtcaaagtgttacattcgggcagcagcggatgatcctccagtatggtagcgcgggtttctgtctcaaaaggaggtagacgatccctactgtacggagtgcgccgagacaaccgagatcgtgttggtcgtagtgtcatgccaaatggaacgccggacgtagtcatatttcctgaagcaaaaccaggtgcgggcgtgacaaacagatctgcgtctccggtctcgccgcttagatcgctctgtgtagtagttgtagtatatccactctctcaaagcatccaggcgccccctggcttcgggttctatgtaaactccttcatgcgccgctgccctgataacatccaccaccgcagaataagccacacccagccaacctacacattcgttctgcgagtcacacacgggaggagcgggaagagctggaagaaccatgtttttttttttattccaaaagattatccaaaacctcaaaatgaagatctattaagtgaacgcgctcccctccggtggcgtggtcaaactctacagccaaagaacagataatggcatttgtaagatgttgcacaatggcttccaaaaggcaaacggccctcacgtccaagtggacgtaaaggctaaacccttcagggtgaatctcctctataaacattccagcaccttcaaccatgcccaaataattctcatctcgccaccttctcaatatatctctaagcaaatcccgaatattaagtccggccattgtaaaaatctgctccagagcgccctccaccttcagcctcaagcagcgaatcatgattgcaaaaattcaggttcctcacagacctgtataagattcaaaagcggaacattaacaaaaataccgcgatcccgtaggtcccttcgcagggccagctgaacataatcgtgcaggtctgcacggaccagcgcggccacttccccgccaggaaccatgacaaaagaacccacactgattatgacacgcatactcggagctatgctaaccagcgtagccccgatgtaagcttgttgcatgggcggcgatataaaatgcaaggtgctgctcaaaaaatcaggcaaagcctcgcgcaaaaaagaaagcacatcgtagtcatgctcatgcagataaaggcaggtaagctccggaaccaccacagaaaaagacaccatttttctctcaaacatgtctgcgggtttctgcataaacacaaaataaaataacaaaaaaacatttaaacattagaagcctgtcttacaacaggaaaaacaacccttataagcataagacggactacggccatgccggcgtgaccgtaaaaaaactggtcaccgtgattaaaaagcaccaccgacagctcctcggtcatgtccggagtcataatgtaagactcggtaaacacatcaggttgattcacatcggtcagtgctaaaaagcgaccgaaatagcccgggggaatacatacccgcaggcgtagagacaacattacagcccccataggaggtataacaaaattaataggagagaaaaacacataaacacctgaaaaaccctcctgcctaggcaaaatagcaccctcccgctccagaacaacatacagcgcttccacagcggcagccataacagtcagccttaccagtaaaaaagaaaacctattaaaaaaacaccactcgacacggcaccagctcaatcagtcacagtgtaaaaaagggccaagtgcagagcgagtatatataggactaaaaaatgacgtaacggttaaagtccacaaaaaacacccagaaaaccgcacgcgaacctacgcccagaaacgaaagccaaaaaacccacaacttcctcaaatcgtcacttccgttttcccacgttacgtcacttcccattttaagaaaactacaattcccaacacatacaagttactccgccctaaaacctacgtcacccgccccgttcccacgccccgcgccacgtcacaaactccaccccctcattatcatattggcttcaatccaaaataaggtatattattgatgatg

SEQ ID NO: 30 - DNA, 35453 bp, Artificial Sequence
  Adk35RF-Spike/E4orf6(RSV)-E4dl-711(E4re#28)
ttaattaacatcatcaataatataccttattttggattgaagccaatatgataatgagggggtggagtttgtgacgtggcgcggggcgtgggaacggggcgggtgacgtagtagtgtggcggaagtgtgatgttgcaagtgtggcggaacacatgtaagcgacggatgtggcaaaagtgacgtttttggtgtgcgccggtgtacacaggaagtgacaattttcgcgcggttttaggcggatgttgtagtaaatttgggcgtaaccgagtaagatttggccattttcgcgggaaaactgaataagaggaagtgaaatctgaataattttgtgttactcatagcgcgtaataatttgatccgcgttaagatacattgatgagtttggacaaaccacaactagaatgcagtgaaaaaaatgctttatttgtgaaatttgtgatgctattgctttatttgtaaccattataagctgcaataaacaagttaacaacaacaattgcattcattttatgtttcaggttcagggggaggtgtgggaggttttttaaagcaagtaaaacctctacaaatgtggtatggctgattatgatcaattttcatggccacttgatgtattgttcatatttgcccagttcttggaggtcaatcagggactcattcaggttcttagccacctcattcagtctgtcaatctccttctggatgttcaccacagaggcattgatgccagagatgtctcccaggtccacatcagggctggtgtggttcttgaagtatttgtccagttcctccttgaaggagtccagttcaggttggagtgggtcatagactgtgttgttcacaatgccaatcaccacatcacagttgccagacacaaaggtgttgtctgtggtgataatctgtggttcatagaagttcctctgggtcacaaaccagtgggtgccattgctcacaaacactccctcccttggaaagtgagccttgccatcatggcagatggcaggggctgtggtgaagttcttctcctgggcaggcacataggtcacatgcaggaacaccactccatgaggggcagactgtggaaaactcatcaggtggtagcccttgccacagaagtccaccctcttgctttgtcccagcacacactcactcatcttggtggcagccaggttggcagatgccctaatctcagcagccctgataagttgttgggtcacataggtttggagggattggagtctgcctgtaatcagtctgtcaatctggacctcagcctccaccttgtccagtctgctcaggatgtcattcagcacagaggagatggctccaaagttgctggaaagttgcttcaccagggtgttcagagcctgggcattctggttcaccacatcttggagtttgcccagggcagaggctgtgctggacagggagtcctgaatcttgccaatggcagagttgaactggttggcaatcagtttctggttctcatagagcacattctgggtcactccaatgccattgaacctgtaagccatctgcatagcaaatgggatttggagggctgctcctgctccaaaggtccagccagaggtgatggtgccagccagcagggcagaggtgtattgggcaatcatctcatctgtcagcagtggaggcagcactgtcagtccattgaacttctgggcacaaatcaggtccctggcagcaatgtctcccagacagtctccatattgcttgatgaagccagcatcagccagggtcaccttgttgaacagcaggtcctcaatgaaggacctcttgcttggcttgcttgggtcaggcagaatctggctgaagttgaagcctccaaagtccttgattggaggtgtcttgtaaatctgcttcacctgggcaaacacctcctgggtgttcttgtcctgttccacagcaatgcctgtcagagccctgttaagttgggtacagaaggagccatattggagcagcaggttgctacactctgtgctgtctccacagatatacattgtacagtccacagaggtcttggtcatactcacaggcagaatctctgtggtcacagagatggtgaagttggttgggatggcaatgctgttgttgctgtaagccacagagttctctgctcccagactcattgtgtaggcaatgatgctctggcttgccacagacctcgacccaccgccaccggtctgggtctggtaggaggcacagatgcctgctccaattgggatgtcacactcataggagttgttcacatgctctgctccaatcagacagccagccctggtctggaacacattgctgcctgtgctgtagaccctccaggttggtgtaagttggtcagcatggatagccacaggcacctcagtacagttcacatcctggtagagcacagccacctggttgctggtgttggtgccaggtgtaatcacagacactcctccaaaggaacatggtgtgatgtccagaatctccaaggtctgtgggtccctcacagcatctgtggtgtcagcaatgtccctgccaaactgttggaatggcaggaacttcttgttgctctctgtcagcactcctgtgcctgtcagtccattgaagttgaagttcacacacttgttcttcaccaggttggtgctcttctttggtccacacactgtggcaggggcatggagcagttcaaaggacagcaccaccaccctgtatggttggtagcccactccattggttggttggaagccataggattggagtggaaagtaacagttgaagccctccactccattacatggtgtgctgccagcctggtaaatctctgtgctgatgtccctctcaaatggtttcaggttgctcttcctgaacagtctgtagaggtagttgtagttgcctcccaccttgctgtccaggttgttgctgttccaggcaatcacacagcctgtgaagtcatcaggcagtttgtagttgtagtcagcaatcttgcctgtttgtccaggggcaatctgtctcacctcatctcccctaatcacaaaggagtcagcatagacattggtgaaacacaggtcattcagtttggttgggctcactccataacacttgaaggtgctgaaggaggcagagttgtagagcacagagtagtcagccacacagttgctaatcctcttcctgttccaggcatagacagaggcaaacctggtggcattgaacacctctccaaatggacacaggttggtgatgtttggaaacctcacaatgctctctgttggttggaccctgaagttgctggtctggtagatgcccttctccactgtgaaggatttcagggtacacttggtctcagacagtgggtccagggcacagtccacagcatctgtgatggtgccattctcattgtatttcagcaggaaggtccttggttggaggtagcccacatagtaggctgctgctcctgctgtccagccagaggaggagtctccaggtgtcaggtaggacctgtgcagagccagcagggtctggaacctggtgatgttgatgccaattggcaggtccaccagtggttccaaggcagagaagccctgtggcaggtccctcaccaggttgattggtgtgtgtttgctgtaaatcttgaagtagccatcaatgttcttgaacacaaactccctcaggttcttgaagttgccctgcttgccctccaagtccatcaggaatggttggctcacatattcaaaggtacagttgttggcagaggagtagaccctgaactcagactccatccaggacttgttgttcttgtggtagtagactcccaggaatgggtcattacagaactggaactcacacaccttaatcaccacattggtggcattgttcacaatcagcagggactgggtcttgctgtccagggtggtgccaaaaatccagcccctgatgatgttgctcttctctgtgctggcaaagtagactccatcattgaatggcagcacagggttgtcaaacctcttggtgccattggtgccagacacatggatggcatggaaccaggtcacattgctgaagaatggcaggaacaggtcctgggtgctgtgcagcacagaggacctgaacaccttgtcagggtagtagactcccctggtgaaggagttggtgtaggcaggaggaagttgggtcctggtggtcaggttcacacactggctggacaccagtggcagcagcaccaggaacacaaacatggtggcaaatcggaggctggatcggtcccggtgtcttctatggaggtcaaaacagcgtggatggcgtctccaggcgatctgacggttcactaaacgagctcgtcgacgatctctatcactgatagggagatctctatcactgatagggagagctctgcttatatagacctcccaccgtacacgcctaccgcccatttgcgtcaatggggcggagttgttacgacattttggaaagtcccgttgattttggtgccaaaacaaactcccattgacgtcaatggggtggagacttggaaatccccgtgagtcaaaccgctatccacgcccattgatgtactgccaaaaccgcatcaccatggtaatagcgatgactaatacgtagatgtactgccaagtaggaaagtcccataaggtcatgtactgggcataatgccaggcgggccatttaccgtcattgacgtcaatagggggcgtacttggcatatgatacacttgatgtactgccaagtgggcagtttaccgtaaatactccacccattgacgtcaatggaaagtccctattggcgttactatgggaacatacgtcattattgacgtcaatgggcgggggtcgttgggcggtcagccaggcgggccatttaccgtaagttatgtaacgcggaactccatatatgggctatgaactaatgaccccgtaattgattactattacagtgtagtcttatgcaatactcttgtagtcttgcaacatggtaacgatgagttagcaacatgccttacaaggagagaaaaagcaccgtgcatgccgattggtggaagtaaggtggtacgatcgtgccttattaggaaggcaacagacgggtctgacatggattggacgaaccactgaattgccgcattgcagagatattgtatttaagtgcctagctcgatacataaacaaactaccccaagctggccaccatgactacgtccggcgttccatttggcatgacactacgaccaacacgatctcggttgtctcggcgcactccgtacagtagggatcgtctacctccttttgagacagaaacccgcgctaccatactggaggatcatccgctgctgcccgaatgtaacactttgacaatgcacaacgtgagttacgtgcgaggtcttccctgcagtgtgggatttacgctgattcaggaatgggttgttccctgggatatggttctaacgcgggaggagcttgtaatcctgaggaagtgtatgcacgtgtgcctgtgttgtgccaacattgatatcatgacgagcatgatgatccatggttacgagtcctgggctctccactgtcattgttccagtcccggttccctgcagtgtatagccggcgggcaggttttggccagctggtttaggatggtggtggatggcgccatgtttaatcagaggtttatatggtaccgggaggtggtgaattacaacatgccaaaagaggtaatgtttatgtccagcgtgtttatgaggggtcgccacttaatctacctgcgcttgtggtatgatggccacgtgggttctgtggtccccgccatgagctttggatacagcgccttgcactgtgggattttgaacaatattgtggtgctgtgctgcagttactgtgctgatttaagtgagatcagggtgcgctgctgtgcccggaggacaaggcgccttatgctgcgggcggtgcgaatcatcgctgaggagaccactgccatgttgtattcctgcaggacggagcggcggcggcagcagtttattcgcgcgctgctgcagcaccaccgccctatcctgatgcacgattatgactctacccccatgtagaagcttggggatcaattctctagagctcgctgatcagcctcgactgtgccttctagttgccagccatctgttgtttgcccctcccccgtgccttccttgaccctggaaggtgccactcccactgtcctttcctaataaaatgaggaaattgcatcgcattgtctgagtaggtgtcattctattctggggggtggggtggggcaggacagcaagggggaggattgggaagacaatagcaggcatgctggggatgcggtgggctctatggcttctgaggaaattgggcgtggcttaagggtgggaaagaatatataaggtgggggtcttatgtagttttgtatctgttttgcagcagccgccgccgccatgagcaccaactcgtttgatggaagcattgtgagctcatatttgacaacgcgcatgcccccatgggccggggtgcgtcagaatgtgatgggctccagcattgatggtcgccccgtcctgcccgcaaactctactaccttgacctacgagaccgtgtctggaacgccgttggagactgcagcctccgccgccgcttcagccgctgcagccaccgcccgcgggattgtgactgactttgctttcctgagcccgcttgcaagcagtgcagcttcccgttcatccgcccgcgatgacaagttgacggctcttttggcacaattggattctttgacccgggaacttaatgtcgtttctcagcagctgttggatctgcgccagcaggtttctgccctgaaggcttcctcccctcccaatgcggtttaaaacataaataaaaaaccagactctgtttggatttggatcaagcaagtgtcttgctgtctttatttaggggttttgcgcgcgcggtaggcccgggaccagcggtctcggtcgttgagggtcctgtgtattttttccaggacgtggtaaaggtgactctggatgttcagatacatgggcataagcccgtctctggggtggaggtagcaccactgcagagcttcatgctgcggggtggtgttgtagatgatccagtcgtagcaggagcgctgggcgtggtgcctaaaaatgtctttcagtagcaagctgattgccaggggcaggcccttggtgtaagtgtttacaaagcggttaagctgggatgggtgcatacgtggggatatgagatgcatcttggactgtatttttaggttggctatgttcccagccatatccctccggggattcatgttgtgcagaaccaccagcacagtgtatccggtgcacttgggaaatttgtcatgtagcttagaaggaaatgcgtggaagaacttggagacgcccttgtgacctccaagattttccatgcattcgtccataatgatggcaatgggcccacgggcggcggcctgggcgaagatatttctgggatcactaacgtcatagttgtgttccaggatgagatcgtcataggccatttttacaaagcgcgggcggagggtgccagactgcggtataatggttccatccggcccaggggcgtagttaccctcacagatttgcatttcccacgctttgagttcagatggggggatcatgtctacctgcggggcgatgaagaaaacggtttccggggtaggggagatcagctgggaagaaagcaggttcctgagcagctgcgacttaccgcagccggtgggcccgtaaatcacacctattaccgggtgcaactggtagttaagagagctgcagctgccgtcatccctgagcaggggggccacttcgttaagcatgtccctgactcgcatgttttccctgaccaaatccgccagaaggcgctcgccgcccagcgatagcagttcttgcaaggaagcaaagtttttcaacggtttgagaccgtccgccgtaggcatgcttttgagcgtttgaccaagcagttccaggcggtcccacagctcggtcacctgctctacggcatctcgatccagcatatctcctcgtttcgcgggttggggcggctttcgctgtacggcagtagtcggtgctcgtccagacgggccagggtcatgtctttccacgggcgcagggtcctcgtcagcgtagtctgggtcacggtgaaggggtgcgctccgggctgcgcgctggccagggtgcgcttgaggctggtcctgctggtgctgaagcgctgccggtcttcgccctgcgcgtcggccaggtagcatttgaccatggtgtcatagtccagcccctccgcggcgtggcccttggcgcgcagcttgcccttggaggaggcgccgcacgaggggcagtgcagacttttgagggcgtagagcttgggcgcgagaaataccgattccggggagtaggcatccgcgccgcaggccccgcagacggtctcgcattccacgagccaggtgagctctggccgttcggggtcaaaaaccaggtttcccccatgctttttgatgcgtttcttacctctggtttccatgagccggtgtccacgctcggtgacgaaaaggctgtccgtgtccccgtatacagacttgagaggcctgtcctcgagcggtgttccgcggtcctcctcgtatagaaactcggaccactctgagacaaaggctcgcgtccaggccagcacgaaggaggctaagtgggaggggtagcggtcgttgtccactagggggtccactcgctccagggtgtgaagacacatgtcgccctcttcggcatcaaggaaggtgattggtttgtaggtgtaggccacgtgaccgggtgttcctgaaggggggctataaaagggggtgggggcgcgttcgtcctcactctcttccgcatcgctgtctgcgagggccagctgttggggtgagtactccctctgaaaagcgggcatgacttctgcgctaagattgtcagtttccaaaaacgaggaggatttgatattcacctggcccgcggtgatgcctttgagggtggccgcatccatctggtcagaaaagacaatctttttgttgtcaagcttggtggcaaacgacccgtagagggcgttggacagcaacttggcgatggagcgcagggtttggtttttgtcgcgatcggcgcgctccttggccgcgatgtttagctgcacgtattcgcgcgcaacgcaccgccattcgggaaagacggtggtgcgctcgtcgggcaccaggtgcacgcgccaaccgcggttgtgcagggtgacaaggtcaacgctggtggctacctctccgcgtaggcgctcgttggtccagcagaggcggccgcccttgcgcgagcagaatggcggtagggggtctagctgcgtctcgtccggggggtctgcgtccacggtaaagaccccgggcagcaggcgcgcgtcgaagtagtctatcttgcatccttgcaagtctagcgcctgctgccatgcgcgggcggcaagcgcgcgctcgtatgggttgagtgggggaccccatggcatggggtgggtgagcgcggaggcgtacatgccgcaaatgtcgtaaacgtagaggggctctctgagtattccaagatatgtagggtagcatcttccaccgcggatgctggcgcgcacgtaatcgtatagttcgtgcgagggagcgaggaggtcgggaccgaggttgctacgggcgggctgctctgctcggaagactatctgcctgaagatggcatgtgagttggatgatatggttggacgctggaagacgttgaagctggcgtctgtgagacctaccgcgtcacgcacgaaggaggcgtaggagtcgcgcagcttgttgaccagctcggcggtgacctgcacgtctagggcgcagtagtccagggtttccttgatgatgtcatacttatcctgtcccttttttttccacagctcgcggttgaggacaaactcttcgcggtctttccagtactcttggatcggaaacccgtcggcctccgaacggtaagagcctagcatgtagaactggttgacggcctggtaggcgcagcatcccttttctacgggtagcgcgtatgcctgcgcggccttccggagcgaggtgtgggtgagcgcaaaggtgtccctgaccatgactttgaggtactggtatttgaagtcagtgtcgtcgcatccgccctgctcccagagcaaaaagtccgtgcgctttttggaacgcggatttggcagggcgaaggtgacatcgttgaagagtatctttcccgcgcgaggcataaagttgcgtgtgatgcggaagggtcccggcacctcggaacggttgttaattacctgggcggcgagcacgatctcgtcaaagccgttgatgttgtggcccacaatgtaaagttccaagaagcgcgggatgcccttgatggaaggcaattttttaagttcctcgtaggtgagctcttcaggggagctgagcccgtgctctgaaagggcccagtctgcaagatgagggttggaagcgacgaatgagctccacaggtcacgggccattagcatttgcaggtggtcgcgaaaggtcctaaactggcgacctatggccattttttctggggtgatgcagtagaaggtaagcgggtcttgttcccagcggtcccatccaaggttcgcggctaggtctcgcgcggcagtcactagaggctcatctccgccgaacttcatgaccagcatgaagggcacgagctgcttcccaaaggcccccatccaagtataggtctctacatcgtaggtgacaaagagacgctcggtgcgaggatgcgagccgatcgggaagaactggatctcccgccaccaattggaggagtggctattgatgtggtgaaagtagaagtccctgcgacgggccgaacactcgtgctggcttttgtaaaaacgtgcgcagtactggcagcggtgcacgggctgtacatcctgcacgaggttgacctgacgaccgcgcacaaggaagcagagtgggaatttgagcccctcgcctggcgggtttggctggtggtcttctacttcggctgcttgtccttgaccgtctggctgctcgaggggagttacggtggatcggaccaccacgccgcgcgagcccaaagtccagatgtccgcgcgcggcggtcggagcttgatgacaacatcgcgcagatgggagctgtccatggtctggagctcccgcggcgtcaggtcaggcgggagctcctgcaggtttacctcgcatagacgggtcagggcgcgggctagatccaggtgatacctaatttccaggggctggttggtggcggcgtcgatggcttgcaagaggccgcatccccgcggcgcgactacggtaccgcgcggcgggcggtgggccgcgggggtgtccttggatgatgcatctaaaagcggtgacgcgggcgagcccccggaggtagggggggctccggacccgccgggagagggggcaggggcacgtcggcgccgcgcgcgggcaggagctggtgctgcgcgcgtaggttgctggcgaacgcgacgacgcggcggttgatctcctgaatctggcgcctctgcgtgaagacgacgggcccggtgagcttgaacctgaaagagagttcgacagaatcaatttcggtgtcgttgacggcggcctggcgcaaaatctcctgcacgtctcctgagttgtcttgataggcgatctcggccatgaactgctcgatctcttcctcctggagatctccgcgtccggctcgctccacggtggcggcgaggtcgttggaaatgcgggccatgagctgcgagaaggcgttgaggcctccctcgttccagacgcggctgtagaccacgcccccttcggcatcgcgggcgcgcatgaccacctgcgcgagattgagctccacgtgccgggcgaagacggcgtagtttcgcaggcgctgaaagaggtagttgagggtggtggcggtgtgttctgccacgaagaagtacataacccagcgtcgcaacgtggattcgttgatatcccccaaggcctcaaggcgctccatggcctcgtagaagtccacggcgaagttgaaaaactgggagttgcgcgccgacacggttaactcctcctccagaagacggatgagctcggcgacagtgtcgcgcacctcgcgctcaaaggctacaggggcctcttcttcttcttcaatctcctcttccataagggcctccccttcttcttcttctggcggcggtgggggaggggggacacggcggcgacgacggcgcaccgggaggcggtcgacaaagcgctcgatcatctccccgcggcgacggcgcatggtctcggtgacggcgcggccgttctcgcgggggcgcagttggaagacgccgcccgtcatgtcccggttatgggttggcggggggctgccatgcggcagggatacggcgctaacgatgcatctcaacaattgttgtgtaggtactccgccgccgagggacctgagcgagtccgcatcgaccggatcggaaaacctctcgagaaaggcgtctaaccagtcacagtcgcaaggtaggctgagcaccgtggcgggcggcagcgggcggcggtcggggttgtttctggcggaggtgctgctgatgatgtaattaaagtaggcggtcttgagacggcggatggtcgacagaagcaccatgtccttgggtccggcctgctgaatgcgcaggcggtcggccatgccccaggcttcgttttgacatcggcgcaggtctttgtagtagtcttgcatgagcctttctaccggcacttcttcttctccttcctcttgtcctgcatctcttgcatctatcgctgcggcggcggcggagtttggccgtaggtggcgccctcttcctcccatgcgtgtgaccccgaagcccctcatcggctgaagcagggctaggtcggcgacaacgcgctcggctaatatggcctgctgcacctgcgtgagggtagactggaagtcatccatgtccacaaagcggtggtatgcgcccgtgttgatggtgtaagtgcagttggccataacggaccagttaacggtctggtgacccggctgcgagagctcggtgtacctgagacgcgagtaagccctcgagtcaaatacgtagtcgttgcaagtccgcaccaggtactggtatcccaccaaaaagtgcggcggcggctggcggtagaggggccagcgtagggtggccggggctccgggggcgagatcttccaacataaggcgatgatatccgtagatgtacctggacatccaggtgatgccggcggcggtggtggaggcgcgcggaaagtcgcggacgcggttccagatgttgcgcagcggcaaaaagtgctccatggtcgggacgctctggccggtcaggcgcgcgcaatcgttgacgctctagcgtgcaaaaggagagcctgtaagcgggcactcttccgtggtctggtggataaattcgcaagggtatcatggcggacgaccggggttcgagccccgtatccggccgtccgccgtgatccatgcggttaccgcccgcgtgtcgaacccaggtgtgcgacgtcagacaacgggggagtgctccttttggcttccttccaggcgcggcggctgctgcgctagcttttttggccactggccgcgcgcagcgtaagcggttaggctggaaagcgaaagcattaagtggctcgctccctgtagccggagggttattttccaagggttgagtcgcgggacccccggttcgagtctcggaccggccggactgcggcgaacgggggtttgcctccccgtcatgcaagaccccgcttgcaaattcctccggaaacagggacgagccccttttttgcttttcccagatgcatccggtgctgcggcagatgcgcccccctcctcagcagcggcaagagcaagagcagcggcagacatgcagggcaccctcccctcctcctaccgcgtcaggaggggcgacatccgcggttgacgcggcagcagatggtgattacgaacccccgcggcgccgggcccggcactacctggacttggaggagggcgagggcctggcgcggctaggagcgccctctcctgagcggcacccaagggtgcagctgaagcgtgatacgcgtgaggcgtacgtgccgcggcagaacctgtttcgcgaccgcgagggagaggagcccgaggagatgcgggatcgaaagttccacgcagggcgcgagctgcggcatggcctgaatcgcgagcggttgctgcgcgaggaggactttgagcccgacgcgcgaaccgggattagtcccgcgcgcgcacacgtggcggccgccgacctggtaaccgcatacgagcagacggtgaaccaggagattaactttcaaaaaagctttaacaaccacgtgcgtacgcttgtggcgcgcgaggaggtggctataggactgatgcatctgtgggactttgtaagcgcgctggagcaaaacccaaatagcaagccgctcatggcgcagctgttccttatagtgcagcacagcagggacaacgaggcattcagggatgcgctgctaaacatagtagagcccgagggccgctggctgctcgatttgataaacatcctgcagagcatagtggtgcaggagcgcagcttgagcctggctgacaaggtggccgccatcaactattccatgcttagcctgggcaagttttacgcccgcaagatataccataccccttacgttcccatagacaaggaggtaaagatcgaggggttctacatgcgcatggcgctgaaggtgcttaccttgagcgacgacctgggcgtttatcgcaacgagcgcatccacaaggccgtgagcgtgagccggcggcgcgagctcagcgaccgcgagctgatgcacagcctgcaaagggccctggctggcacgggcagcggcgatagagaggccgagtcctactttgacgcgggcgctgacctgcgctgggccccaagccgacgcgccctggaggcagctggggccggacctgggctggcggtggcacccgcgcgcgctggcaacgtcggcggcgtggaggaatatgacgaggacgatgagtacgagccagaggacggcgagtactaagcggtgatgtttctgatcagatgatgcaagacgcaacggacccggcggtgcgggcggcgctgcagagccagccgtccggccttaactccacggacgactggcgccaggtcatggaccgcatcatgtcgctgactgcgcgcaatcctgacgcgttccggcagcagccgcaggccaaccggctctccgcaattctggaagcggtggtcccggcgcgcgcaaaccccacgcacgagaaggtgctggcgatcgtaaacgcgctggccgaaaacagggccatccggcccgacgaggccggcctggtctacgacgcgctgcttcagcgcgtggctcgttacaacagcggcaacgtgcagaccaacctggaccggctggtgggggatgtgcgcgaggccgtggcgcagcgtgagcgcgcgcagcagcagggcaacctgggctccatggttgcactaaacgccttcctgagtacacagcccgccaacgtgccgcggggacaggaggactacaccaactttgtgagcgcactgcggctaatggtgactgagacaccgcaaagtgaggtgtaccagtctgggccagactattttttccagaccagtagacaaggcctgcagaccgtaaacctgagccaggctttcaaaaacttgcaggggctgtggggggtgcgggctcccacaggcgaccgcgcgaccgtgtctagcttgctgacgcccaactcgcgcctgttgctgctgctaatagcgcccttcacggacagtggcagcgtgtcccgggacacatacctaggtcacttgctgacactgtaccgcgaggccataggtcaggcgcatgtggacgagcatactttccaggagattacaagtgtcagccgcgcgctggggcaggaggacacgggcagcctggaggcaaccctaaactacctgctgaccaaccggcggcagaagatcccctcgttgcacagtttaaacagcgaggaggagcgcattttgcgctacgtgcagcagagcgtgagccttaacctgatgcgcgacggggtaacgcccagcgtggcgctggacatgaccgcgcgcaacatggaaccgggcatgtatgcctcaaaccggccgtttatcaaccgcctaatggactacttgcatcgcgcggccgccgtgaaccccgagtatttcaccaatgccatcttgaacccgcactggctaccgccccctggtttctacaccgggggattcgaggtgcccgagggtaacgatggattcctctgggacgacatagacgacagcgtgttttccccgcaaccgcagaccctgctagagttgcaacagcgcgagcaggcagaggcggcgctgcgaaaggaaagcttccgcaggccaagcagcttgtccgatctaggcgctgcggccccgcggtcagatgctagtagcccatttccaagcttgatagggtctcttaccagcactcgcaccacccgcccgcgcctgctgggcgaggaggagtacctaaacaactcgctgctgcagccgcagcgcgaaaaaaacctgcctccggcatttcccaacaacgggatagagagcctagtggacaagatgagtagatggaagacgtacgcgcaggagcacagggacgtgccaggcccgcgcccgcccacccgtcgtcaaaggcacgaccgtcagcggggtctggtgtgggaggacgatgactcggcagacgacagcagcgtcctggatttgggagggagtggcaacccgtttgcgcaccttcgccccaggctggggagaatgttttaaaaaaaaaaaagcatgatgcaaaataaaaaactcaccaaggccatggcaccgagcgttggttttcttgtattccccttagtatgcggcgcgcggcgatgtatgaggaaggtcctcctccctcctacgagagtgtggtgagcgcggcgccagtggcggcggcgctgggttctcccttcgatgctcccctggacccgccgtttgtgcctccgcggtacctgcggcctaccggggggagaaacagcatccgttactctgagttggcacccctattcgacaccacccgtgtgtacctggtggacaacaagtcaacggatgtggcatccctgaactaccagaacgaccacagcaactttctgaccacggtcattcaaaacaatgactacagcccgggggaggcaagcacacagaccatcaatcttgacgaccggtcgcactggggcggcgacctgaaaaccatcctgcataccaacatgccaaatgtgaacgagttcatgtttaccaataagtttaaggcgcgggtgatggtgtcgcgcttgcctactaaggacaatcaggtggagctgaaatacgagtgggtggagttcacgctgcccgagggcaactactccgagaccatgaccatagaccttatgaacaacgcgatcgtggagcactacttgaaagtgggcagacagaacggggttctggaaagcgacatcggggtaaagtttgacacccgcaacttcagactggggtttgaccccgtcactggtcttgtcatgcctggggtatatacaaacgaagccttccatccagacatcattttgctgccaggatgcggggtggacttcacccacagccgcctgagcaacttgttgggcatccgcaagcggcaacccttccaggagggctttaggatcacctacgatgatctggagggtggtaacattcccgcactgttggatgtggacgcctaccaggcgagcttgaaagatgacaccgaacagggcgggggtggcgcaggcggcagcaacagcagtggcagcggcgcggaagagaactccaacgcggcagccgcggcaatgcagccggtggaggacatgaacgatcatgccattcgcggcgacacctttgccacacgggctgaggagaagcgcgctgaggccgaagcagcggccgaagctgccgcccccgctgcgcaacccgaggtcgagaagcctcagaagaaaccggtgatcaaacccctgacagaggacagcaagaaacgcagttacaacctaataagcaatgacagcaccttcacccagtaccgcagctggtaccttgcatacaactacggcgaccctcagaccggaatccgctcatggaccctgctttgcactcctgacgtaacctgcggctcggagcaggtctactggtcgttgccagacatgatgcaagaccccgtgaccttccgctccacgcgccagatcagcaactttccggtggtgggcgccgagctgttgcccgtgcactccaagagcttctacaacgaccaggccgtctactcccaactcatccgccagtttacctctctgacccacgtgttcaatcgctttcccgagaaccagattttggcgcgcccgccagcccccaccatcaccaccgtcagtgaaaacgttcctgctctcacagatcacgggacgctaccgctgcgcaacagcatcggaggagtccagcgagtgaccattactgacgccagacgccgcacctgcccctacgtttacaaggccctgggcatagtctcgccgcgcgtcctatcgagccgcactttttgagcaagcatgtccatccttatatcgcccagcaataacacaggctggggcctgcgcttcccaagcaagatgtttggcggggccaagaagcgctccgaccaacacccagtgcgcgtgcgcgggcactaccgcgcgccctggggcgcgcacaaacgcggccgcactgggcgcaccaccgtcgatgacgccatcgacgcggtggtggaggaggcgcgcaactacacgcccacgccgccaccagtgtccacagtggacgcggccattcagaccgtggtgcgcggagcccggcgctatgctaaaatgaagagacggcggaggcgcgtagcacgtcgccaccgccgccgacccggcactgccgcccaacgcgcggcggcggccctgcttaaccgcgcacgtcgcaccggccgacgggcggccatgcgggccgctcgaaggctggccgcgggtattgtcactgtgccccccaggtccaggcgacgagcggccgccgcagcagccgcggccattagtgctatgactcagggtcgcaggggcaacgtgtattgggtgcgcgactcggttagcggcctgcgcgtgcccgtgcgcacccgccccccgcgcaactagattgcaagaaaaaactacttagactcgtactgttgtatgtatccagcggcggcggcgcgcaacgaagctatgtccaagcgcaaaatcaaagaagagatgctccaggtcatcgcgccggagatctatggccccccgaagaaggaagagcaggattacaagccccgaaagctaaagcgggtcaaaaagaaaaagaaagatgatgatgatgaacttgacgacgaggtggaactgctgcacgctaccgcgcccaggcgacgggtacagtggaaaggtcgacgcgtaaaacgtgttttgcgacccggcaccaccgtagtctttacgcccggtgagcgctccacccgcacctacaagcgcgtgtatgatgaggtgtacggcgacgaggacctgcttgagcaggccaacgagcgcctcggggagtttgcctacggaaagcggcataaggacatgctggcgttgccgctggacgagggcaacccaacacctagcctaaagcccgtaacactgcagcaggtgctgcccgcgcttgcaccgtccgaagaaaagcgcggcctaaagcgcgagtctggtgacttggcacccaccgtgcagctgatggtacccaagcgccagcgactggaagatgtcttggaaaaaatgaccgtggaacctgggctggagcccgaggtccgcgtgcggccaatcaagcaggtggcgccgggactgggcgtgcagaccgtggacgttcagatacccactaccagtagcaccagtattgccaccgccacagagggcatggagacacaaacgtccccggttgcctcagcggtggcggatgccgcggtgcaggcggtcgctgcggccgcgtccaagacctctacggaggtgcaaacggacccgtggatgtttcgcgtttcagccccccggcgcccgcgccgttcgaggaagtacggcgccgccagcgcgctactgcccgaatatgccctacatccttccattgcgcctacccccggctatcgtggctacacctaccgccccagaagacgagcaactacccgacgccgaaccaccactggaacccgccgccgccgtcgccgtcgccagcccgtgctggccccgatttccgtgcgcagggtggctcgcgaaggaggcaggaccctggtgctgccaacagcgcgctaccaccccagcatcgtttaaaagccggtctttgtggttcttgcagatatggccctcacctgccgcctccgtttcccggtgccgggattccgaggaagaatgcaccgtaggaggggcatggccggccacggcctgacgggcggcatgcgtcgtgcgcaccaccggcggcggcgcgcgtcgcaccgtcgcatgcgcggcggtatcctgcccctccttattccactgatcgccgcggcgattggcgccgtgcccggaattgcatccgtggccttgcaggcgcagagacactgattaaaaacaagttgcatgtggaaaaatcaaaataaaaagtctggactctcacgctcgcttggtcctgtaactattttgtagaatggaagacatcaactttgcgtctctggccccgcgacacggctcgcgcccgttcatgggaaactggcaagatatcggcaccagcaatatgagcggtggcgccttcagctggggctcgctgtggagcggcattaaaaatttcggttccaccgttaagaactatggcagcaaggcctggaacagcagcacaggccagatgctgagggataagttgaaagagcaaaatttccaacaaaaggtggtagatggcctggcctctggcattagcggggtggtggacctggccaaccaggcagtgcaaaataagattaacagtaagcttgatccccgccctcccgtagaggagcctccaccggccgtggagacagtgtctccagaggggcgtggcgaaaagcgtccgcgccccgacagggaagaaactctggtgacgcaaatagacgagcctccctcgtacgaggaggcactaaagcaaggcctgcccaccacccgtcccatcgcgcccatggctaccggagtgctgggccagcacacacccgtaacgctggacctgcctccccccgccgacacccagcagaaacctgtgctgccaggcccgaccgccgttgttgtaacccgtcctagccgcgcgtccctgcgccgcgccgccagcggtccgcgatcgttgcggcccgtagccagtggcaactggcaaagcacactgaacagcatcgtgggtctgggggtgcaatccctgaagcgccgacgatgcttctgatagctaacgtgtcgtatgtgtgtcatgtatgcgtccatgtcgccgccagaggagctgctgagccgccgcgcgcccgctttccaagatggctaccccttcgatgatgccgcagtggtcttacatgcacatctcgggccaggacgcctcggagtacctgagccccgggctggtgcagtttgcccgcgccaccgagacgtacttcagcctgaataacaagtttagaaaccccacggtggcgcctacgcacgacgtgaccacagaccggtcccagcgtttgacgctgcggttcatccctgtggaccgtgaggatactgcgtactcgtacaaggcgcggttcaccctagctgtgggtgataaccgtgtgctggacatggcttccacgtactttgacatccgcggcgtgctggacaggggccctacttttaagccctactctggcactgcctacaacgccctggctcccaagggtgccccaaatccttgcgaatgggatgaagctgctactgctcttgaaataaacctagaagaagaggacgatgacaacgaagacgaagtagacgagcaagctgagcagcaaaaaactcacgtatttgggcaggcgccttattctggtataaatattacaaaggagggtattcaaataggtgtcgaaggtcaaacacctaaatatgccgataaaacatttcaacctgaacctcaaataggagaatctcagtggtacgaaacagaaattaatcatgcagctgggagagtcctaaaaaagactaccccaatgaaaccatgttacggttcatatgcaaaacccacaaatgaaaatggagggcaaggcattcttgtaaagcaacaaaatggaaagctagaaagtcaagtggaaatgcaatttttctcaactactgaggcagccgcaggcaatggtgataacttgactcctaaagtggtattgtacagtgaagatgtagatatagaaaccccagacactcatatttcttacatgcccactattaaggaaggtaactcacgagaactaatgggccaacaatctatgcccaacaggcctaattacattgcttttagggacaattttattggtctaatgtattacaacagcacgggtaatatgggtgttctggcgggccaagcatcgcagttgaatgctgttgtagatttgcaagacagaaacacagagctttcataccagcttttgcttgattccattggtgatagaaccaggtacttttctatgtggaatcaggctgttgacagctatgatccagatgttagaattattgaaaatcatggaactgaagatgaacttccaaattactgctttccactgggaggtgtgattaatacagagactcttaccaaggtaaaacctaaaacaggtcaggaaaatggatgggaaaaagatgctacagaattttcagataaaaatgaaataagagttggaaataattttgccatggaaatcaatctaaatgccaacctgtggagaaatttcctgtactccaacatagcgctgtatttgcccgacaagctaaagtacagtccttccaacgtaaaaatttctgataacccaaacacctacgactacatgaacaagcgagtggtggctcccgggctagtggactgctacattaaccttggagcacgctggtcccttgactatatggacaacgtcaacccatttaaccaccaccgcaatgctggcctgcgctaccgctcaatgttgctgggcaatggtcgctatgtgcccttccacatccaggtgcctcagaagttctttgccattaaaaacctccttctcctgccgggctcatacacctacgagtggaacttcaggaaggatgttaacatggttctgcagagctccctaggaaatgacctaagggttgacggagccagcattaagtttgatagcatttgcctttacgccaccttcttccccatggcccacaacaccgcctccacgcttgaggccatgcttagaaacgacaccaacgaccagtcctttaacgactatctctccgccgccaacatgctctaccctatacccgccaacgctaccaacgtgcccatatccatcccctcccgcaactgggcggctttccgcggctgggccttcacgcgccttaagactaaggaaaccccatcactgggctcgggctacgacccttattacacctactctggctctataccctacctagatggaaccttttacctcaaccacacctttaagaaggtggccattacctttgactcttctgtcagctggcctggcaatgaccgcctgcttacccccaacgagtttgaaattaagcgctcagttgacggggagggttacaacgttgcccagtgtaacatgaccaaagactggttcctggtacaaatgctagctaactataacattggctaccagggcttctatatcccagagagctacaaggaccgcatgtactccttctttagaaacttccagcccatgagccgtcaggtggtggatgatactaaatacaaggactaccaacaggtgggcatcctacaccaacacaacaactctggatttgttggctaccttgcccccaccatgcgcgaaggacaggcctaccctgctaacttcccctatccgcttataggcaagaccgcagttgacagcattacccagaaaaagtttctttgcgatcgcaccctttggcgcatcccattctccagtaactttatgtccatgggcgcactcacagacctgggccaaaaccttctctacgccaactccgcccacgcgctagacatgacttttgaggtggatcccatggacgagcccacccttctttatgttttgtttgaagtctttgacgtggtccgtgtgcaccagccgcaccgcggcgtcatcgaaaccgtgtacctgcgcacgcccttctcggccggcaacgccacaacataaagaagcaagcaacatcaacaacagctgccgccatgggctccagtgagcaggaactgaaagccattgtcaaagatcttggttgtgggccatattttttgggcacctatgacaagcgctttccaggctttgtttctccacacaagctcgcctgcgccatagtcaatacggccggtcgcgagactgggggcgtacactggatggcctttgcctggaacccgcactcaaaaacatgctacctctttgagccctttggcttttctgaccagcgactcaagcaggtttaccagtttgagtacgagtcactcctgcgccgtagcgccattgcttcttcccccgaccgctgtataacgctggaaaagtccacccaaagcgtacaggggcccaactcggccgcctgtggactattctgctgcatgtttctccacgcctttgccaactggccccaaactcccatggatcacaaccccaccatgaaccttattaccggggtacccaactccatgctcaacagtccccaggtacagcccaccctgcgtcgcaaccaggaacagctctacagcttcctggagcgccactcgccctacttccgcagccacagtgcgcagattaggagcgccacttctttttgtcacttgaaaaacatgtaaaaataatgtactagagacactttcaataaaggcaaatgcttttatttgtacactctcgggtgattatttacccccacccttgccgtctgcgccgtttaaaaatcaaaggggttctgccgcgcatcgctatgcgccactggcagggacacgttgcgatactggtgtttagtgctccacttaaactcaggcacaaccatccgcggcagctcggtgaagttttcactccacaggctgcgcaccatcaccaacgcgtttagcaggtcgggcgccgatatcttgaagtcgcagttggggcctccgccctgcgcgcgcgagttgcgatacacagggttgcagcactggaacactatcagcgccgggtggtgcacgctggccagcacgctcttgtcggagatcagatccgcgtccaggtcctccgcgttgctcagggcgaacggagtcaactttggtagctgccttcccaaaaagggcgcgtgcccaggctttgagttgcactcgcaccgtagtggcatcaaaaggtgaccgtgcccggtctgggcgttaggatacagcgcctgcataaaagccttgatctgcttaaaagccacctgagcctttgcgccttcagagaagaacatgccgcaagacttgccggaaaactgattggccggacaggccgcgtcgtgcacgcagcaccttgcgtcggtgttggagatctgcaccacatttcggccccaccggttcttcacgatcttggccttgctagactgctccttcagcgcgcgctgcccgttttcgctcgtcacatccatttcaatcacgtgctccttatttatcataatgcttccgtgtagacacttaagctcgccttcgatctcagcgcagcggtgcagccacaacgcgcagcccgtgggctcgtgatgcttgtaggtcacctctgcaaacgactgcaggtacgcctgcaggaatcgccccatcatcgtcacaaaggtcttgttgctggtgaaggtcagctgcaacccgcggtgctcctcgttcagccaggtcttgcatacggccgccagagcttccacttggtcaggcagtagtttgaagttcgcctttagatcgttatccacgtggtacttgtccatcagcgcgcgcgcagcctccatgcccttctcccacgcagacacgatcggcacactcagcgggttcatcaccgtaatttcactttccgcttcgctgggctcttcctcttcctcttgcgtccgcataccacgcgccactgggtcgtcttcattcagccgccgcactgtgcgcttacctcctttgccatgcttgattagcaccggtgggttgctgaaacccaccatttgtagcgccacatcttctctttcttcctcgctgtccacgattacctctggtgatggcgggcgctcgggcttgggagaagggcgcttctttttcttcttgggcgcaatggccaaatccgccgccgaggtcgatggccgcgggctgggtgtgcgcggcaccagcgcgtcttgtgatgagtcttcctcgtcctcggactcgatacgccgcctcatccgcttttttgggggcgcccggggaggcggcggcgacggggacggggacgacacgtcctccatggttgggggacgtcgcgccgcaccgcgtccgcgctcgggggtggtttcgcgctgctcctcttcccgactggccatttccttctcctataggcagaaaaagatcatggagtcagtcgagaagaaggacagcctaaccgccccctctgagttcgccaccaccgcctccaccgatgccgccaacgcgcctaccaccttccccgtcgaggcacccccgcttgaggaggaggaagtgattatcgagcaggacccaggttttgtaagcgaagacgacgaggaccgctcagtaccaacagaggataaaaagcaagaccaggacaacgcagaggcaaacgaggaacaagtcgggcggggggacgaaaggcatggcgactacctagatgtgggagacgacgtgctgttgaagcatctgcagcgccagtgcgccattatctgcgacgcgttgcaagagcgcagcgatgtgcccctcgccatagcggatgtcagccttgcctacgaacgccacctattctcaccgcgcgtaccccccaaacgccaagaaaacggcacatgcgagcccaacccgcgcctcaacttctaccccgtatttgccgtgccagaggtgcttgccacctatcacatctttttccaaaactgcaagatacccctatcctgccgtgccaaccgcagccgagcggacaagcagctggccttgcggcagggcgctgtcatacctgatatcgcctcgctcaacgaagtgccaaaaatctttgagggtcttggacgcgacgagaagcgcgcggcaaacgctctgcaacaggaaaacagcgaaaatgaaagtcactctggagtgttggtggaactcgagggtgacaacgcgcgcctagccgtactaaaacgcagcatcgaggtcacccactttgcctacccggcacttaacctaccccccaaggtcatgagcacagtcatgagtgagctgatcgtgcgccgtgcgcagcccctggagagggatgcaaatttgcaagaacaaacagaggagggcctacccgcagttggcgacgagcagctagcgcgctggcttcaaacgcgcgagcctgccgacttggaggagcgacgcaaactaatgatggccgcagtgctcgttaccgtggagcttgagtgcatgcagcggttctttgctgacccggagatgcagcgcaagctagaggaaacattgcactacacctttcgacagggctacgtacgccaggcctgcaagatctccaacgtggagctctgcaacctggtctcctaccttggaattttgcacgaaaaccgccttgggcaaaacgtgcttcattccacgctcaagggcgaggcgcgccgcgactacgtccgcgactgcgtttacttatttctatgctacacctggcagacggccatgggcgtttggcagcagtgcttggaggagtgcaacctcaaggagctgcagaaactgctaaagcaaaacttgaaggacctatggacggccttcaacgagcgctccgtggccgcgcacctggcggacatcattttccccgaacgcctgcttaaaaccctgcaacagggtctgccagacttcaccagtcaaagcatgttgcagaactttaggaactttatcctagagcgctcaggaatcttgcccgccacctgctgtgcacttcctagcgactttgtgcccattaagtaccgcgaatgccctccgccgctttggggccactgctaccttctgcagctagccaactaccttgcctaccactctgacataatggaagacgtgagcggtgacggtctactggagtgtcactgtcgctgcaacctatgcaccccgcaccgctccctggtttgcaattcgcagctgcttaacgaaagtcaaattatcggtacctttgagctgcagggtccctcgcctgacgaaaagtccgcggctccggggttgaaactcactccggggctgtggacgtcggcttaccttcgcaaatttgtacctgaggactaccacgcccacgagattaggttctacgaagaccaatcccgcccgcctaatgcggagcttaccgcctgcgtcattacccagggccacattcttggccaattgcaagccatcaacaaagcccgccaagagtttctgctacgaaagggacggggggtttacttggacccccagtccggcgaggagctcaacccaatccccccgccgccgcagccctatcagcagcagccgcgggcccttgcttcccaggatggcacccaaaaagaagctgcagctgccgccgccacccacggacgaggaggaatactgggacagtcaggcagaggaggttttggacgaggaggaggaggacatgatggaagactgggagagcctagacgaggaagcttccgaggtcgaagaggtgtcagacgaaacaccgtcaccctcggtcgcattcccctcgccggcgccccagaaatcggcaaccggttccagcatggctacaacctccgctcctcaggcgccgccggcactgcccgttcgccgacccaaccgtagatgggacaccactggaaccagggccggtaagtccaagcagccgccgccgttagcccaagagcaacaacagcgccaaggctaccgctcatggcgcgggcacaagaacgccatagttgcttgcttgcaagactgtgggggcaacatctccttcgcccgccgctttcttctctaccatcacggcgtggccttcccccgtaacatcctgcattactaccgtcatctctacagcccatactgcaccggcggcagcggcagcaacagcagcggccacacagaagcaaaggcgaccggatagcaagactctgacaaagcccaagaaatccacagcggcggcagcagcaggaggaggagcgctgcgtctggcgcccaacgaacccgtatcgacccgcgagcttagaaacaggatttttcccactctgtatgctatatttcaacagagcaggggccaagaacaagagctgaaaataaaaaacaggtctctgcgatccctcacccgcagctgcctgtatcacaaaagcgaagatcagcttcggcgcacgctggaagacgcggaggctctcttcagtaaatactgcgcgctgactcttaaggactagtttcgcgccctttctcaaatttaagcgcgaaaactacgtcatctccagcggccacacccggcgccagcacctgttgtcagcgccattatgagcaaggaaattcccacgccctacatgtggagttaccagccacaaatgggacttgcggctggagctgcccaagactactcaacccgaataaactacatgagcgcgggaccccacatgatatcccgggtcaacggaatacgcgcccaccgaaaccgaattctcctggaacaggcggctattaccaccacacctcgtaataaccttaatccccgtagttggcccgctgccctggtgtaccaggaaagtcccgctcccaccactgtggtacttcccagagacgcccaggccgaagttcagatgactaactcaggggcgcagcttgcgggcggctttcgtcacagggtgcggtcgcccgggcagggtataactcacctgacaatcagagggcgaggtattcagctcaacgacgagtcggtgagctcctcgcttggtctccgtccggacgggacatttcagatcggcggcgccggccgctcttcattcacgcctcgtcaggcaatcctaactctgcagacctcgtcctctgagccgcgctctggaggcattggaactctgcaatttattgaggagtttgtgccatcggtctactttaaccccttctcgggacctcccggccactatccggatcaatttattcctaactttgacgcggtaaaggactcggcggacggctacgactgaatgttaagtggagaggcagagcaactgcgcctgaaacacctggtccactgtcgccgccacaagtgctttgcccgcgactccggtgagttttgctactttgaattgcccgaggatcatatcgagggcccggcgcacggcgtccggcttaccgcccagggagagcttgcccgtagcctgattcgggagtttacccagcgccccctgctagttgagcgggacaggggaccctgtgttctcactgtgatttgcaactgtcctaaccctggattacatcaagatcctctagttaatgtcaggtcgcctaagtcgattaactagagtacccggggatcttattccctttaactaataaaaaaaaataataaagcatcacttacttaaaatcagttagcaaatttctgtccagtttattcagcagcacctccttgccctcctcccagctctggtattgcagcttcctcctggctgcaaactttctccacaatctaaatggaatgtcagtttcctcctgttcctgtccatccgcacccactatcttcatgttgttgcagatgaagcgcgcaagaccgtctgaagataccttcaaccccgtgtatccatatgacacggaaaccggtcctccaactgtgccttttcttactcctccctttgtatcccccaatgggtttcaagagagtccccctggggtactctctttgcgcctatccgaacctctagttacctccaatggcatgcttgcgctcaaaatgggcaacggcctctctctggacgaggccggcaaccttacctcccaaaatgtaaccactgtgagcccacctctcaaaaaaaccaagtcaaacataaacctggaaatatctgcacccctcacagttacctcagaagccctaactgtggctgccgccgcacctctaatggtcgcgggcaacacactcaccatgcaatcacaggccccgctaaccgtgcacgactccaaacttagcattgccacccaaggacccctcacagtgtcagaaggaaagctagccctgcaaacatcaggccccctcaccaccaccgatagcagtacccttactatcactgcctcaccccctctaactactgccactggtagcttgggcattgacttgaaagagcccatttatacacaaaatggaaaactaggactaaagtacggggctcctttgcatgtaacagacgacctaaacactttgaccgtagcaactggtccaggtgtgactattaataatacttccttgcaaactaaagttactggagccttgggttttgattcacaaggcaatatgcaacttaatgtagcaggaggactaaggattgattctcaaaacagacgccttatacttgatgttagttatccgtttgatgctcaaaaccaactaaatctaagactaggacagggccctctttttataaactcagcccacaacttggatattaactacaacaaaggcctttacttgtttacagcttcaaacaattccaaaaagcttgaggttaacctaagcactgccaaggggttgatgtttgacgctacagccatagccattaatgcaggagatgggcttgaatttggttcacctaatgcaccaaacacaaatcccctcaaaacaaaaattggccatggcctagaatttgattcaaacaaggctatggttcctaaactaggaactggccttagttttgacagcacaggtgccattacagtaggaaacaaaaataatgataagctaactttgtggaccggaataaaccctccacctaactgtcaaattgtggaaaacactaatacaaatgatggcaaacttactttagtattagtaaaaaatggagggcttgttaatggctacgtgtctctagttggtgtatcagacactgtgaaccaaatgttcacacaaaagacagcaaacatccaattaagattatattttgactcttctggaaatctattaactgaggaatcagacttaaaaattccacttaaaaataaatcttctacagcgaccagtgaaactgtagccagcagcaaagcctttatgccaagtactacagcttatcccttcaacaccactactagggatagtgaaaactacattcatggaatatgttactacatgactagttatgatagaagtctatttcccttgaacatttctataatgctaaacagccgtatgatttcttccaatgttgcctatgccatacaatttgaatggaatctaaatgcaagtgaatctccagaaagcaacatagctacgctgaccacatccccctttttcttttcttacattacagaagacgacaactaaagaatcgtttgtgttatgtttcaacgtgtttatttttcaattgcagaaaatttcaagtcatttttcattcagtagtatagccccaccaccacatagcttatacagatcaccgtaccttaatcaaactcacagaaccctagtattcaacctgccacctccctcccaacacacagagtacacagtcctttctccccggctggccttaaaaagcatcatatcatgggtaacagacatattcttaggtgttatattccacacggtttcctgtcgagccaaacgctcatcagtgatattaataaactccccgggcagctcacttaagttcatgtcgctgtccagctgctgagccacaggctgctgtccaacttgcggttgcttaacgggcggcgaaggagaagtccacgcgttgtgcattgtcaaagtgttacattcgggcagcagcggatgatcctccagtatggtagcgcgggtttctgtctcaaaaggaggtagacgatccctactgtacggagtgcgccgagacaaccgagatcgtgttggtcgtagtgtcatgccaaatggaacgccggacgtagtcatatttcctgaagcaaaaccaggtgcgggcgtgacaaacagatctgcgtctccggtctcgccgcttagatcgctctgtgtagtagttgtagtatatccactctctcaaagcatccaggcgccccctggcttcgggttctatgtaaactccttcatgcgccgctgccctgataacatccaccaccgcagaataagccacacccagccaacctacacattcgttctgcgagtcacacacgggaggagcgggaagagctggaagaaccatgtttttttttttattccaaaagattatccaaaacctcaaaatgaagatctattaagtgaacgcgctcccctccggtggcgtggtcaaactctacagccaaagaacagataatggcatttgtaagatgttgcacaatggcttccaaaaggcaaacggccctcacgtccaagtggacgtaaaggctaaacccttcagggtgaatctcctctataaacattccagcaccttcaaccatgcccaaataattctcatctcgccaccttctcaatatatctctaagcaaatcccgaatattaagtccggccattgtaaaaatctgctccagagcgccctccaccttcagcctcaagcagcgaatcatgattgcaaaaattcaggttcctcacagacctgtataagattcaaaagcggaacattaacaaaaataccgcgatcccgtaggtcccttcgcagggccagctgaacataatcgtgcaggtctgcacggaccagcgcggccacttccccgccaggaaccatgacaaaagaacccacactgattatgacacgcatactcggagctatgctaaccagcgtagccccgatgtaagcttgttgcatgggcggcgatataaaatgcaaggtgctgctcaaaaaatcaggcaaagcctcgcgcaaaaaagaaagcacatcgtagtcatgctcatgcagataaaggcaggtaagctccggaaccaccacagaaaaagacaccatttttctctcaaacatgtctgcgggtttctgcataaacacaaaataaaataacaaaaaaacatttaaacattagaagcctgtcttacaacaggaaaaacaacccttataagcataagacggactacggccatgccggcgtgaccgtaaaaaaactggtcaccgtgattaaaaagcaccaccgacagctcctcggtcatgtccggagtcataatgtaagactcggtaaacacatcaggttgattcacatcggtcagtgctaaaaagcgaccgaaatagcccgggggaatacatacccgcaggcgtagagacaacattacagcccccataggaggtataacaaaattaataggagagaaaaacacataaacacctgaaaaaccctcctgcctaggcaaaatagcaccctcccgctccagaacaacatacagcgcttccacagcggcagccataacagtcagccttaccagtaaaaaagaaaacctattaaaaaaacaccactcgacacggcaccagctcaatcagtcacagtgtaaaaaagggccaagtgcagagcgagtatatataggactaaaaaatgacgtaacggttaaagtccacaaaaaacacccagaaaaccgcacgcgaacctacgcccagaaacgaaagccaaaaaacccacaacttcctcaaatcgtcacttccgttttcccacgttacgtcacttcccattttaagaaaactacaattcccaacacatacaagttactccgccctaaaacctacgtcacccgccccgttcccacgccccgcgccacgtcacaaactccaccccctcattatcatattggcttcaatccaaaataaggtatattattgatgatg

SEQ ID NO: 31 - DNA, 35726 bp, Artificial Sequence
  Adk35F2-Spike/E4orf6(mPGK)-E4dl-711(E4re#29)
ttaattaacatcatcaataatataccttattttggattgaagccaatatgataatgagggggtggagtttgtgacgtggcgcggggcgtgggaacggggcgggtgacgtagtagtgtggcggaagtgtgatgttgcaagtgtggcggaacacatgtaagcgacggatgtggcaaaagtgacgtttttggtgtgcgccggtgtacacaggaagtgacaattttcgcgcggttttaggcggatgttgtagtaaatttgggcgtaaccgagtaagatttggccattttcgcgggaaaactgaataagaggaagtgaaatctgaataattttgtgttactcatagcgcgtaataatttctgtaatagtaatcaattacggggtcattagttcatagcccatatatggagttccgcgttacataacttacggtaaatggcccgcctggctgaccgcccaacgacccccgcccattgacgtcaataatgacgtatgttcccatagtaacgccaatagggactttccattgacgtcaatgggtggagtatttacggtaaactgcccacttggcagtacatcaagtgtatcatatgccaagtacgccccctattgacgtcaatgacggtaaatggcccgcctggcattatgcccagtacatgaccttatgggactttcctacttggcagtacatctacgtattagtcatcgctattaccatggtgatgcggttttggcagtacatcaatgggcgtggatagcggtttgactcacggggatttccaagtctccaccccattgacgtcaatgggagtttgttttggcaccaaaatcaacgggactttccaaaatgtcgtaacaactccgccccattgacgcaaatgggcggtaggcgtgtacggtgggaggtctatataagcagagctctccctatcagtgatagagatctccctatcagtgatagagatcgtcgacgagctcgtttagtgaaccgtcagatcgcctggagacgccatccacgctgttttgacctccatagaagacaccgggaccgatccagcctccgatttgccaccatgtttgtgttcctggtgctgctgccactggtgtccagccagtgtgtgaacctgaccaccaggacccaacttcctcctgcctacaccaactccttcaccaggggagtctactaccctgacaaggtgttcaggtcctctgtgctgcacagcacccaggacctgttcctgccattcttcagcaatgtgacctggttccatgccatccatgtgtctggcaccaatggcaccaagaggtttgacaaccctgtgctgccattcaatgatggagtctactttgccagcacagagaagagcaacatcatcaggggctggatttttggcaccaccctggacagcaagacccagtccctgctgattgtgaacaatgccaccaatgtggtgattaaggtgtgtgagttccagttctgtaatgacccattcctgggagtctactaccacaagaacaacaagtcctggatggagtctgagttcagggtctactcctctgccaacaactgtacctttgaatatgtgagccaaccattcctgatggacttggagggcaagcagggcaacttcaagaacctgagggagtttgtgttcaagaacattgatggctacttcaagatttacagcaaacacacaccaatcaacctggtgagggacctgccacagggcttctctgccttggaaccactggtggacctgccaattggcatcaacatcaccaggttccagaccctgctggctctgcacaggtcctacctgacacctggagactcctcctctggctggacagcaggagcagcagcctactatgtgggctacctccaaccaaggaccttcctgctgaaatacaatgagaatggcaccatcacagatgctgtggactgtgccctggacccactgtctgagaccaagtgtaccctgaaatccttcacagtggagaagggcatctaccagaccagcaacttcagggtccaaccaacagagagcattgtgaggtttccaaacatcaccaacctgtgtccatttggagaggtgttcaatgccaccaggtttgcctctgtctatgcctggaacaggaagaggattagcaactgtgtggctgactactctgtgctctacaactctgcctccttcagcaccttcaagtgttatggagtgagcccaaccaaactgaatgacctgtgtttcaccaatgtctatgctgactcctttgtgattaggggagatgaggtgagacagattgcccctggacaaacaggcaagattgctgactacaactacaaactgcctgatgacttcacaggctgtgtgattgcctggaacagcaacaacctggacagcaaggtgggaggcaactacaactacctctacagactgttcaggaagagcaacctgaaaccatttgagagggacatcagcacagagatttaccaggctggcagcacaccatgtaatggagtggagggcttcaactgttactttccactccaatcctatggcttccaaccaaccaatggagtgggctaccaaccatacagggtggtggtgctgtcctttgaactgctccatgcccctgccacagtgtgtggaccaaagaagagcaccaacctggtgaagaacaagtgtgtgaacttcaacttcaatggactgacaggcacaggagtgctgacagagagcaacaagaagttcctgccattccaacagtttggcagggacattgctgacaccacagatgctgtgagggacccacagaccttggagattctggacatcacaccatgttcctttggaggagtgtctgtgattacacctggcaccaacaccagcaaccaggtggctgtgctctaccaggatgtgaactgtactgaggtgcctgtggctatccatgctgaccaacttacaccaacctggagggtctacagcacaggcagcaatgtgttccagaccagggctggctgtctgattggagcagagcatgtgaacaactcctatgagtgtgacatcccaattggagcaggcatctgtgcctcctaccagacccagaccggtggcggtgggtcgaggtctgtggcaagccagagcatcattgcctacacaatgagtctgggagcagagaactctgtggcttacagcaacaacagcattgccatcccaaccaacttcaccatctctgtgaccacagagattctgcctgtgagtatgaccaagacctctgtggactgtacaatgtatatctgtggagacagcacagagtgtagcaacctgctgctccaatatggctccttctgtacccaacttaacagggctctgacaggcattgctgtggaacaggacaagaacacccaggaggtgtttgcccaggtgaagcagatttacaagacacctccaatcaaggactttggaggcttcaacttcagccagattctgcctgacccaagcaagccaagcaagaggtccttcattgaggacctgctgttcaacaaggtgaccctggctgatgctggcttcatcaagcaatatggagactgtctgggagacattgctgccagggacctgatttgtgcccagaagttcaatggactgacagtgctgcctccactgctgacagatgagatgattgcccaatacacctctgccctgctggctggcaccatcacctctggctggacctttggagcaggagcagccctccaaatcccatttgctatgcagatggcttacaggttcaatggcattggagtgacccagaatgtgctctatgagaaccagaaactgattgccaaccagttcaactctgccattggcaagattcaggactccctgtccagcacagcctctgccctgggcaaactccaagatgtggtgaaccagaatgcccaggctctgaacaccctggtgaagcaactttccagcaactttggagccatctcctctgtgctgaatgacatcctgagcagactggacaaggtggaggctgaggtccagattgacagactgattacaggcagactccaatccctccaaacctatgtgacccaacaacttatcagggctgctgagattagggcatctgccaacctggctgccaccaagatgagtgagtgtgtgctgggacaaagcaagagggtggacttctgtggcaagggctaccacctgatgagttttccacagtctgcccctcatggagtggtgttcctgcatgtgacctatgtgcctgcccaggagaagaacttcaccacagcccctgccatctgccatgatggcaaggctcactttccaagggagggagtgtttgtgagcaatggcacccactggtttgtgacccagaggaacttctatgaaccacagattatcaccacagacaacacctttgtgtctggcaactgtgatgtggtgattggcattgtgaacaacacagtctatgacccactccaacctgaactggactccttcaaggaggaactggacaaatacttcaagaaccacaccagccctgatgtggacctgggagacatctctggcatcaatgcctctgtggtgaacatccagaaggagattgacagactgaatgaggtggctaagaacctgaatgagtccctgattgacctccaagaactgggcaaatatgaacaatacatcaagtggccatgaaaattgatcataatcagccataccacatttgtagaggttttacttgctttaaaaaacctcccacacctccccctgaacctgaaacataaaatgaatgcaattgttgttgttaacttgtttattgcagcttataatggttacaaataaagcaatagcatcacaaatttcacaaataaagcatttttttcactgcattctagttgtggtttgtccaaactcatcaatgtatcttaacgcggatcgggtaggggaggcgcttttcccaaggcagtctggagcatgcgctttagcagccccgctgggcacttggcgctacacaagtggcctctggcctcgcacacattccacatccaccggtaggcgccaaccggctccgttctttggtggccccttcgcgccaccttctactcctcccctagtcaggaagttcccccccgccccgcagctcgcgtcgtgcaggacgtgacaaatggaagtagcacgtctcactagtctcgtgcagatggacagcaccgctgagcaatggaagcgggtaggcctttggggcagcggccaatagcagctttgctccttcgctttctgggctcagaggctgggaaggggtgggtccgggggcgggctcaggggcgggctcaggggcggggcgggcgcccgaaggtcctccggaggcccggcattctgcacgcttcaaaagcgcacgtctgccgcgctgttctcctcttcctcatctccgggcctttcgaaactaccccaagctggccaccatgactacgtccggcgttccatttggcatgacactacgaccaacacgatctcggttgtctcggcgcactccgtacagtagggatcgtctacctccttttgagacagaaacccgcgctaccatactggaggatcatccgctgctgcccgaatgtaacactttgacaatgcacaacgtgagttacgtgcgaggtcttccctgcagtgtgggatttacgctgattcaggaatgggttgttccctgggatatggttctaacgcgggaggagcttgtaatcctgaggaagtgtatgcacgtgtgcctgtgttgtgccaacattgatatcatgacgagcatgatgatccatggttacgagtcctgggctctccactgtcattgttccagtcccggttccctgcagtgtatagccggcgggcaggttttggccagctggtttaggatggtggtggatggcgccatgtttaatcagaggtttatatggtaccgggaggtggtgaattacaacatgccaaaagaggtaatgtttatgtccagcgtgtttatgaggggtcgccacttaatctacctgcgcttgtggtatgatggccacgtgggttctgtggtccccgccatgagctttggatacagcgccttgcactgtgggattttgaacaatattgtggtgctgtgctgcagttactgtgctgatttaagtgagatcagggtgcgctgctgtgcccggaggacaaggcgccttatgctgcgggcggtgcgaatcatcgctgaggagaccactgccatgttgtattcctgcaggacggagcggcggcggcagcagtttattcgcgcgctgctgcagcaccaccgccctatcctgatgcacgattatgactctacccccatgtagaagcttggggatcaattctctagagctcgctgatcagcctcgactgtgccttctagttgccagccatctgttgtttgcccctcccccgtgccttccttgaccctggaaggtgccactcccactgtcctttcctaataaaatgaggaaattgcatcgcattgtctgagtaggtgtcattctattctggggggtggggtggggcaggacagcaagggggaggattgggaagacaatagcaggcatgctggggatgcggtgggctctatggcttctgaggaaattgggcgtggcttaagggtgggaaagaatatataaggtgggggtcttatgtagttttgtatctgttttgcagcagccgccgccgccatgagcaccaactcgtttgatggaagcattgtgagctcatatttgacaacgcgcatgcccccatgggccggggtgcgtcagaatgtgatgggctccagcattgatggtcgccccgtcctgcccgcaaactctactaccttgacctacgagaccgtgtctggaacgccgttggagactgcagcctccgccgccgcttcagccgctgcagccaccgcccgcgggattgtgactgactttgctttcctgagcccgcttgcaagcagtgcagcttcccgttcatccgcccgcgatgacaagttgacggctcttttggcacaattggattctttgacccgggaacttaatgtcgtttctcagcagctgttggatctgcgccagcaggtttctgccctgaaggcttcctcccctcccaatgcggtttaaaacataaataaaaaaccagactctgtttggatttggatcaagcaagtgtcttgctgtctttatttaggggttttgcgcgcgcggtaggcccgggaccagcggtctcggtcgttgagggtcctgtgtattttttccaggacgtggtaaaggtgactctggatgttcagatacatgggcataagcccgtctctggggtggaggtagcaccactgcagagcttcatgctgcggggtggtgttgtagatgatccagtcgtagcaggagcgctgggcgtggtgcctaaaaatgtctttcagtagcaagctgattgccaggggcaggcccttggtgtaagtgtttacaaagcggttaagctgggatgggtgcatacgtggggatatgagatgcatcttggactgtatttttaggttggctatgttcccagccatatccctccggggattcatgttgtgcagaaccaccagcacagtgtatccggtgcacttgggaaatttgtcatgtagcttagaaggaaatgcgtggaagaacttggagacgcccttgtgacctccaagattttccatgcattcgtccataatgatggcaatgggcccacgggcggcggcctgggcgaagatatttctgggatcactaacgtcatagttgtgttccaggatgagatcgtcataggccatttttacaaagcgcgggcggagggtgccagactgcggtataatggttccatccggcccaggggcgtagttaccctcacagatttgcatttcccacgctttgagttcagatggggggatcatgtctacctgcggggcgatgaagaaaacggtttccggggtaggggagatcagctgggaagaaagcaggttcctgagcagctgcgacttaccgcagccggtgggcccgtaaatcacacctattaccgggtgcaactggtagttaagagagctgcagctgccgtcatccctgagcaggggggccacttcgttaagcatgtccctgactcgcatgttttccctgaccaaatccgccagaaggcgctcgccgcccagcgatagcagttcttgcaaggaagcaaagtttttcaacggtttgagaccgtccgccgtaggcatgcttttgagcgtttgaccaagcagttccaggcggtcccacagctcggtcacctgctctacggcatctcgatccagcatatctcctcgtttcgcgggttggggcggctttcgctgtacggcagtagtcggtgctcgtccagacgggccagggtcatgtctttccacgggcgcagggtcctcgtcagcgtagtctgggtcacggtgaaggggtgcgctccgggctgcgcgctggccagggtgcgcttgaggctggtcctgctggtgctgaagcgctgccggtcttcgccctgcgcgtcggccaggtagcatttgaccatggtgtcatagtccagcccctccgcggcgtggcccttggcgcgcagcttgcccttggaggaggcgccgcacgaggggcagtgcagacttttgagggcgtagagcttgggcgcgagaaataccgattccggggagtaggcatccgcgccgcaggccccgcagacggtctcgcattccacgagccaggtgagctctggccgttcggggtcaaaaaccaggtttcccccatgctttttgatgcgtttcttacctctggtttccatgagccggtgtccacgctcggtgacgaaaaggctgtccgtgtccccgtatacagacttgagaggcctgtcctcgagcggtgttccgcggtcctcctcgtatagaaactcggaccactctgagacaaaggctcgcgtccaggccagcacgaaggaggctaagtgggaggggtagcggtcgttgtccactagggggtccactcgctccagggtgtgaagacacatgtcgccctcttcggcatcaaggaaggtgattggtttgtaggtgtaggccacgtgaccgggtgttcctgaaggggggctataaaagggggtgggggcgcgttcgtcctcactctcttccgcatcgctgtctgcgagggccagctgttggggtgagtactccctctgaaaagcgggcatgacttctgcgctaagattgtcagtttccaaaaacgaggaggatttgatattcacctggcccgcggtgatgcctttgagggtggccgcatccatctggtcagaaaagacaatctttttgttgtcaagcttggtggcaaacgacccgtagagggcgttggacagcaacttggcgatggagcgcagggtttggtttttgtcgcgatcggcgcgctccttggccgcgatgtttagctgcacgtattcgcgcgcaacgcaccgccattcgggaaagacggtggtgcgctcgtcgggcaccaggtgcacgcgccaaccgcggttgtgcagggtgacaaggtcaacgctggtggctacctctccgcgtaggcgctcgttggtccagcagaggcggccgcccttgcgcgagcagaatggcggtagggggtctagctgcgtctcgtccggggggtctgcgtccacggtaaagaccccgggcagcaggcgcgcgtcgaagtagtctatcttgcatccttgcaagtctagcgcctgctgccatgcgcgggcggcaagcgcgcgctcgtatgggttgagtgggggaccccatggcatggggtgggtgagcgcggaggcgtacatgccgcaaatgtcgtaaacgtagaggggctctctgagtattccaagatatgtagggtagcatcttccaccgcggatgctggcgcgcacgtaatcgtatagttcgtgcgagggagcgaggaggtcgggaccgaggttgctacgggcgggctgctctgctcggaagactatctgcctgaagatggcatgtgagttggatgatatggttggacgctggaagacgttgaagctggcgtctgtgagacctaccgcgtcacgcacgaaggaggcgtaggagtcgcgcagcttgttgaccagctcggcggtgacctgcacgtctagggcgcagtagtccagggtttccttgatgatgtcatacttatcctgtcccttttttttccacagctcgcggttgaggacaaactcttcgcggtctttccagtactcttggatcggaaacccgtcggcctccgaacggtaagagcctagcatgtagaactggttgacggcctggtaggcgcagcatcccttttctacgggtagcgcgtatgcctgcgcggccttccggagcgaggtgtgggtgagcgcaaaggtgtccctgaccatgactttgaggtactggtatttgaagtcagtgtcgtcgcatccgccctgctcccagagcaaaaagtccgtgcgctttttggaacgcggatttggcagggcgaaggtgacatcgttgaagagtatctttcccgcgcgaggcataaagttgcgtgtgatgcggaagggtcccggcacctcggaacggttgttaattacctgggcggcgagcacgatctcgtcaaagccgttgatgttgtggcccacaatgtaaagttccaagaagcgcgggatgcccttgatggaaggcaattttttaagttcctcgtaggtgagctcttcaggggagctgagcccgtgctctgaaagggcccagtctgcaagatgagggttggaagcgacgaatgagctccacaggtcacgggccattagcatttgcaggtggtcgcgaaaggtcctaaactggcgacctatggccattttttctggggtgatgcagtagaaggtaagcgggtcttgttcccagcggtcccatccaaggttcgcggctaggtctcgcgcggcagtcactagaggctcatctccgccgaacttcatgaccagcatgaagggcacgagctgcttcccaaaggcccccatccaagtataggtctctacatcgtaggtgacaaagagacgctcggtgcgaggatgcgagccgatcgggaagaactggatctcccgccaccaattggaggagtggctattgatgtggtgaaagtagaagtccctgcgacgggccgaacactcgtgctggcttttgtaaaaacgtgcgcagtactggcagcggtgcacgggctgtacatcctgcacgaggttgacctgacgaccgcgcacaaggaagcagagtgggaatttgagcccctcgcctggcgggtttggctggtggtcttctacttcggctgcttgtccttgaccgtctggctgctcgaggggagttacggtggatcggaccaccacgccgcgcgagcccaaagtccagatgtccgcgcgcggcggtcggagcttgatgacaacatcgcgcagatgggagctgtccatggtctggagctcccgcggcgtcaggtcaggcgggagctcctgcaggtttacctcgcatagacgggtcagggcgcgggctagatccaggtgatacctaatttccaggggctggttggtggcggcgtcgatggcttgcaagaggccgcatccccgcggcgcgactacggtaccgcgcggcgggcggtgggccgcgggggtgtccttggatgatgcatctaaaagcggtgacgcgggcgagcccccggaggtagggggggctccggacccgccgggagagggggcaggggcacgtcggcgccgcgcgcgggcaggagctggtgctgcgcgcgtaggttgctggcgaacgcgacgacgcggcggttgatctcctgaatctggcgcctctgcgtgaagacgacgggcccggtgagcttgaacctgaaagagagttcgacagaatcaatttcggtgtcgttgacggcggcctggcgcaaaatctcctgcacgtctcctgagttgtcttgataggcgatctcggccatgaactgctcgatctcttcctcctggagatctccgcgtccggctcgctccacggtggcggcgaggtcgttggaaatgcgggccatgagctgcgagaaggcgttgaggcctccctcgttccagacgcggctgtagaccacgcccccttcggcatcgcgggcgcgcatgaccacctgcgcgagattgagctccacgtgccgggcgaagacggcgtagtttcgcaggcgctgaaagaggtagttgagggtggtggcggtgtgttctgccacgaagaagtacataacccagcgtcgcaacgtggattcgttgatatcccccaaggcctcaaggcgctccatggcctcgtagaagtccacggcgaagttgaaaaactgggagttgcgcgccgacacggttaactcctcctccagaagacggatgagctcggcgacagtgtcgcgcacctcgcgctcaaaggctacaggggcctcttcttcttcttcaatctcctcttccataagggcctccccttcttcttcttctggcggcggtgggggaggggggacacggcggcgacgacggcgcaccgggaggcggtcgacaaagcgctcgatcatctccccgcggcgacggcgcatggtctcggtgacggcgcggccgttctcgcgggggcgcagttggaagacgccgcccgtcatgtcccggttatgggttggcggggggctgccatgcggcagggatacggcgctaacgatgcatctcaacaattgttgtgtaggtactccgccgccgagggacctgagcgagtccgcatcgaccggatcggaaaacctctcgagaaaggcgtctaaccagtcacagtcgcaaggtaggctgagcaccgtggcgggcggcagcgggcggcggtcggggttgtttctggcggaggtgctgctgatgatgtaattaaagtaggcggtcttgagacggcggatggtcgacagaagcaccatgtccttgggtccggcctgctgaatgcgcaggcggtcggccatgccccaggcttcgttttgacatcggcgcaggtctttgtagtagtcttgcatgagcctttctaccggcacttcttcttctccttcctcttgtcctgcatctcttgcatctatcgctgcggcggcggcggagtttggccgtaggtggcgccctcttcctcccatgcgtgtgaccccgaagcccctcatcggctgaagcagggctaggtcggcgacaacgcgctcggctaatatggcctgctgcacctgcgtgagggtagactggaagtcatccatgtccacaaagcggtggtatgcgcccgtgttgatggtgtaagtgcagttggccataacggaccagttaacggtctggtgacccggctgcgagagctcggtgtacctgagacgcgagtaagccctcgagtcaaatacgtagtcgttgcaagtccgcaccaggtactggtatcccaccaaaaagtgcggcggcggctggcggtagaggggccagcgtagggtggccggggctccgggggcgagatcttccaacataaggcgatgatatccgtagatgtacctggacatccaggtgatgccggcggcggtggtggaggcgcgcggaaagtcgcggacgcggttccagatgttgcgcagcggcaaaaagtgctccatggtcgggacgctctggccggtcaggcgcgcgcaatcgttgacgctctagcgtgcaaaaggagagcctgtaagcgggcactcttccgtggtctggtggataaattcgcaagggtatcatggcggacgaccggggttcgagccccgtatccggccgtccgccgtgatccatgcggttaccgcccgcgtgtcgaacccaggtgtgcgacgtcagacaacgggggagtgctccttttggcttccttccaggcgcggcggctgctgcgctagcttttttggccactggccgcgcgcagcgtaagcggttaggctggaaagcgaaagcattaagtggctcgctccctgtagccggagggttattttccaagggttgagtcgcgggacccccggttcgagtctcggaccggccggactgcggcgaacgggggtttgcctccccgtcatgcaagaccccgcttgcaaattcctccggaaacagggacgagccccttttttgcttttcccagatgcatccggtgctgcggcagatgcgcccccctcctcagcagcggcaagagcaagagcagcggcagacatgcagggcaccctcccctcctcctaccgcgtcaggaggggcgacatccgcggttgacgcggcagcagatggtgattacgaacccccgcggcgccgggcccggcactacctggacttggaggagggcgagggcctggcgcggctaggagcgccctctcctgagcggcacccaagggtgcagctgaagcgtgatacgcgtgaggcgtacgtgccgcggcagaacctgtttcgcgaccgcgagggagaggagcccgaggagatgcgggatcgaaagttccacgcagggcgcgagctgcggcatggcctgaatcgcgagcggttgctgcgcgaggaggactttgagcccgacgcgcgaaccgggattagtcccgcgcgcgcacacgtggcggccgccgacctggtaaccgcatacgagcagacggtgaaccaggagattaactttcaaaaaagctttaacaaccacgtgcgtacgcttgtggcgcgcgaggaggtggctataggactgatgcatctgtgggactttgtaagcgcgctggagcaaaacccaaatagcaagccgctcatggcgcagctgttccttatagtgcagcacagcagggacaacgaggcattcagggatgcgctgctaaacatagtagagcccgagggccgctggctgctcgatttgataaacatcctgcagagcatagtggtgcaggagcgcagcttgagcctggctgacaaggtggccgccatcaactattccatgcttagcctgggcaagttttacgcccgcaagatataccataccccttacgttcccatagacaaggaggtaaagatcgaggggttctacatgcgcatggcgctgaaggtgcttaccttgagcgacgacctgggcgtttatcgcaacgagcgcatccacaaggccgtgagcgtgagccggcggcgcgagctcagcgaccgcgagctgatgcacagcctgcaaagggccctggctggcacgggcagcggcgatagagaggccgagtcctactttgacgcgggcgctgacctgcgctgggccccaagccgacgcgccctggaggcagctggggccggacctgggctggcggtggcacccgcgcgcgctggcaacgtcggcggcgtggaggaatatgacgaggacgatgagtacgagccagaggacggcgagtactaagcggtgatgtttctgatcagatgatgcaagacgcaacggacccggcggtgcgggcggcgctgcagagccagccgtccggccttaactccacggacgactggcgccaggtcatggaccgcatcatgtcgctgactgcgcgcaatcctgacgcgttccggcagcagccgcaggccaaccggctctccgcaattctggaagcggtggtcccggcgcgcgcaaaccccacgcacgagaaggtgctggcgatcgtaaacgcgctggccgaaaacagggccatccggcccgacgaggccggcctggtctacgacgcgctgcttcagcgcgtggctcgttacaacagcggcaacgtgcagaccaacctggaccggctggtgggggatgtgcgcgaggccgtggcgcagcgtgagcgcgcgcagcagcagggcaacctgggctccatggttgcactaaacgccttcctgagtacacagcccgccaacgtgccgcggggacaggaggactacaccaactttgtgagcgcactgcggctaatggtgactgagacaccgcaaagtgaggtgtaccagtctgggccagactattttttccagaccagtagacaaggcctgcagaccgtaaacctgagccaggctttcaaaaacttgcaggggctgtggggggtgcgggctcccacaggcgaccgcgcgaccgtgtctagcttgctgacgcccaactcgcgcctgttgctgctgctaatagcgcccttcacggacagtggcagcgtgtcccgggacacatacctaggtcacttgctgacactgtaccgcgaggccataggtcaggcgcatgtggacgagcatactttccaggagattacaagtgtcagccgcgcgctggggcaggaggacacgggcagcctggaggcaaccctaaactacctgctgaccaaccggcggcagaagatcccctcgttgcacagtttaaacagcgaggaggagcgcattttgcgctacgtgcagcagagcgtgagccttaacctgatgcgcgacggggtaacgcccagcgtggcgctggacatgaccgcgcgcaacatggaaccgggcatgtatgcctcaaaccggccgtttatcaaccgcctaatggactacttgcatcgcgcggccgccgtgaaccccgagtatttcaccaatgccatcttgaacccgcactggctaccgccccctggtttctacaccgggggattcgaggtgcccgagggtaacgatggattcctctgggacgacatagacgacagcgtgttttccccgcaaccgcagaccctgctagagttgcaacagcgcgagcaggcagaggcggcgctgcgaaaggaaagcttccgcaggccaagcagcttgtccgatctaggcgctgcggccccgcggtcagatgctagtagcccatttccaagcttgatagggtctcttaccagcactcgcaccacccgcccgcgcctgctgggcgaggaggagtacctaaacaactcgctgctgcagccgcagcgcgaaaaaaacctgcctccggcatttcccaacaacgggatagagagcctagtggacaagatgagtagatggaagacgtacgcgcaggagcacagggacgtgccaggcccgcgcccgcccacccgtcgtcaaaggcacgaccgtcagcggggtctggtgtgggaggacgatgactcggcagacgacagcagcgtcctggatttgggagggagtggcaacccgtttgcgcaccttcgccccaggctggggagaatgttttaaaaaaaaaaaagcatgatgcaaaataaaaaactcaccaaggccatggcaccgagcgttggttttcttgtattccccttagtatgcggcgcgcggcgatgtatgaggaaggtcctcctccctcctacgagagtgtggtgagcgcggcgccagtggcggcggcgctgggttctcccttcgatgctcccctggacccgccgtttgtgcctccgcggtacctgcggcctaccggggggagaaacagcatccgttactctgagttggcacccctattcgacaccacccgtgtgtacctggtggacaacaagtcaacggatgtggcatccctgaactaccagaacgaccacagcaactttctgaccacggtcattcaaaacaatgactacagcccgggggaggcaagcacacagaccatcaatcttgacgaccggtcgcactggggcggcgacctgaaaaccatcctgcataccaacatgccaaatgtgaacgagttcatgtttaccaataagtttaaggcgcgggtgatggtgtcgcgcttgcctactaaggacaatcaggtggagctgaaatacgagtgggtggagttcacgctgcccgagggcaactactccgagaccatgaccatagaccttatgaacaacgcgatcgtggagcactacttgaaagtgggcagacagaacggggttctggaaagcgacatcggggtaaagtttgacacccgcaacttcagactggggtttgaccccgtcactggtcttgtcatgcctggggtatatacaaacgaagccttccatccagacatcattttgctgccaggatgcggggtggacttcacccacagccgcctgagcaacttgttgggcatccgcaagcggcaacccttccaggagggctttaggatcacctacgatgatctggagggtggtaacattcccgcactgttggatgtggacgcctaccaggcgagcttgaaagatgacaccgaacagggcgggggtggcgcaggcggcagcaacagcagtggcagcggcgcggaagagaactccaacgcggcagccgcggcaatgcagccggtggaggacatgaacgatcatgccattcgcggcgacacctttgccacacgggctgaggagaagcgcgctgaggccgaagcagcggccgaagctgccgcccccgctgcgcaacccgaggtcgagaagcctcagaagaaaccggtgatcaaacccctgacagaggacagcaagaaacgcagttacaacctaataagcaatgacagcaccttcacccagtaccgcagctggtaccttgcatacaactacggcgaccctcagaccggaatccgctcatggaccctgctttgcactcctgacgtaacctgcggctcggagcaggtctactggtcgttgccagacatgatgcaagaccccgtgaccttccgctccacgcgccagatcagcaactttccggtggtgggcgccgagctgttgcccgtgcactccaagagcttctacaacgaccaggccgtctactcccaactcatccgccagtttacctctctgacccacgtgttcaatcgctttcccgagaaccagattttggcgcgcccgccagcccccaccatcaccaccgtcagtgaaaacgttcctgctctcacagatcacgggacgctaccgctgcgcaacagcatcggaggagtccagcgagtgaccattactgacgccagacgccgcacctgcccctacgtttacaaggccctgggcatagtctcgccgcgcgtcctatcgagccgcactttttgagcaagcatgtccatccttatatcgcccagcaataacacaggctggggcctgcgcttcccaagcaagatgtttggcggggccaagaagcgctccgaccaacacccagtgcgcgtgcgcgggcactaccgcgcgccctggggcgcgcacaaacgcggccgcactgggcgcaccaccgtcgatgacgccatcgacgcggtggtggaggaggcgcgcaactacacgcccacgccgccaccagtgtccacagtggacgcggccattcagaccgtggtgcgcggagcccggcgctatgctaaaatgaagagacggcggaggcgcgtagcacgtcgccaccgccgccgacccggcactgccgcccaacgcgcggcggcggccctgcttaaccgcgcacgtcgcaccggccgacgggcggccatgcgggccgctcgaaggctggccgcgggtattgtcactgtgccccccaggtccaggcgacgagcggccgccgcagcagccgcggccattagtgctatgactcagggtcgcaggggcaacgtgtattgggtgcgcgactcggttagcggcctgcgcgtgcccgtgcgcacccgccccccgcgcaactagattgcaagaaaaaactacttagactcgtactgttgtatgtatccagcggcggcggcgcgcaacgaagctatgtccaagcgcaaaatcaaagaagagatgctccaggtcatcgcgccggagatctatggccccccgaagaaggaagagcaggattacaagccccgaaagctaaagcgggtcaaaaagaaaaagaaagatgatgatgatgaacttgacgacgaggtggaactgctgcacgctaccgcgcccaggcgacgggtacagtggaaaggtcgacgcgtaaaacgtgttttgcgacccggcaccaccgtagtctttacgcccggtgagcgctccacccgcacctacaagcgcgtgtatgatgaggtgtacggcgacgaggacctgcttgagcaggccaacgagcgcctcggggagtttgcctacggaaagcggcataaggacatgctggcgttgccgctggacgagggcaacccaacacctagcctaaagcccgtaacactgcagcaggtgctgcccgcgcttgcaccgtccgaagaaaagcgcggcctaaagcgcgagtctggtgacttggcacccaccgtgcagctgatggtacccaagcgccagcgactggaagatgtcttggaaaaaatgaccgtggaacctgggctggagcccgaggtccgcgtgcggccaatcaagcaggtggcgccgggactgggcgtgcagaccgtggacgttcagatacccactaccagtagcaccagtattgccaccgccacagagggcatggagacacaaacgtccccggttgcctcagcggtggcggatgccgcggtgcaggcggtcgctgcggccgcgtccaagacctctacggaggtgcaaacggacccgtggatgtttcgcgtttcagccccccggcgcccgcgccgttcgaggaagtacggcgccgccagcgcgctactgcccgaatatgccctacatccttccattgcgcctacccccggctatcgtggctacacctaccgccccagaagacgagcaactacccgacgccgaaccaccactggaacccgccgccgccgtcgccgtcgccagcccgtgctggccccgatttccgtgcgcagggtggctcgcgaaggaggcaggaccctggtgctgccaacagcgcgctaccaccccagcatcgtttaaaagccggtctttgtggttcttgcagatatggccctcacctgccgcctccgtttcccggtgccgggattccgaggaagaatgcaccgtaggaggggcatggccggccacggcctgacgggcggcatgcgtcgtgcgcaccaccggcggcggcgcgcgtcgcaccgtcgcatgcgcggcggtatcctgcccctccttattccactgatcgccgcggcgattggcgccgtgcccggaattgcatccgtggccttgcaggcgcagagacactgattaaaaacaagttgcatgtggaaaaatcaaaataaaaagtctggactctcacgctcgcttggtcctgtaactattttgtagaatggaagacatcaactttgcgtctctggccccgcgacacggctcgcgcccgttcatgggaaactggcaagatatcggcaccagcaatatgagcggtggcgccttcagctggggctcgctgtggagcggcattaaaaatttcggttccaccgttaagaactatggcagcaaggcctggaacagcagcacaggccagatgctgagggataagttgaaagagcaaaatttccaacaaaaggtggtagatggcctggcctctggcattagcggggtggtggacctggccaaccaggcagtgcaaaataagattaacagtaagcttgatccccgccctcccgtagaggagcctccaccggccgtggagacagtgtctccagaggggcgtggcgaaaagcgtccgcgccccgacagggaagaaactctggtgacgcaaatagacgagcctccctcgtacgaggaggcactaaagcaaggcctgcccaccacccgtcccatcgcgcccatggctaccggagtgctgggccagcacacacccgtaacgctggacctgcctccccccgccgacacccagcagaaacctgtgctgccaggcccgaccgccgttgttgtaacccgtcctagccgcgcgtccctgcgccgcgccgccagcggtccgcgatcgttgcggcccgtagccagtggcaactggcaaagcacactgaacagcatcgtgggtctgggggtgcaatccctgaagcgccgacgatgcttctgatagctaacgtgtcgtatgtgtgtcatgtatgcgtccatgtcgccgccagaggagctgctgagccgccgcgcgcccgctttccaagatggctaccccttcgatgatgccgcagtggtcttacatgcacatctcgggccaggacgcctcggagtacctgagccccgggctggtgcagtttgcccgcgccaccgagacgtacttcagcctgaataacaagtttagaaaccccacggtggcgcctacgcacgacgtgaccacagaccggtcccagcgtttgacgctgcggttcatccctgtggaccgtgaggatactgcgtactcgtacaaggcgcggttcaccctagctgtgggtgataaccgtgtgctggacatggcttccacgtactttgacatccgcggcgtgctggacaggggccctacttttaagccctactctggcactgcctacaacgccctggctcccaagggtgccccaaatccttgcgaatgggatgaagctgctactgctcttgaaataaacctagaagaagaggacgatgacaacgaagacgaagtagacgagcaagctgagcagcaaaaaactcacgtatttgggcaggcgccttattctggtataaatattacaaaggagggtattcaaataggtgtcgaaggtcaaacacctaaatatgccgataaaacatttcaacctgaacctcaaataggagaatctcagtggtacgaaacagaaattaatcatgcagctgggagagtcctaaaaaagactaccccaatgaaaccatgttacggttcatatgcaaaacccacaaatgaaaatggagggcaaggcattcttgtaaagcaacaaaatggaaagctagaaagtcaagtggaaatgcaatttttctcaactactgaggcagccgcaggcaatggtgataacttgactcctaaagtggtattgtacagtgaagatgtagatatagaaaccccagacactcatatttcttacatgcccactattaaggaaggtaactcacgagaactaatgggccaacaatctatgcccaacaggcctaattacattgcttttagggacaattttattggtctaatgtattacaacagcacgggtaatatgggtgttctggcgggccaagcatcgcagttgaatgctgttgtagatttgcaagacagaaacacagagctttcataccagcttttgcttgattccattggtgatagaaccaggtacttttctatgtggaatcaggctgttgacagctatgatccagatgttagaattattgaaaatcatggaactgaagatgaacttccaaattactgctttccactgggaggtgtgattaatacagagactcttaccaaggtaaaacctaaaacaggtcaggaaaatggatgggaaaaagatgctacagaattttcagataaaaatgaaataagagttggaaataattttgccatggaaatcaatctaaatgccaacctgtggagaaatttcctgtactccaacatagcgctgtatttgcccgacaagctaaagtacagtccttccaacgtaaaaatttctgataacccaaacacctacgactacatgaacaagcgagtggtggctcccgggctagtggactgctacattaaccttggagcacgctggtcccttgactatatggacaacgtcaacccatttaaccaccaccgcaatgctggcctgcgctaccgctcaatgttgctgggcaatggtcgctatgtgcccttccacatccaggtgcctcagaagttctttgccattaaaaacctccttctcctgccgggctcatacacctacgagtggaacttcaggaaggatgttaacatggttctgcagagctccctaggaaatgacctaagggttgacggagccagcattaagtttgatagcatttgcctttacgccaccttcttccccatggcccacaacaccgcctccacgcttgaggccatgcttagaaacgacaccaacgaccagtcctttaacgactatctctccgccgccaacatgctctaccctatacccgccaacgctaccaacgtgcccatatccatcccctcccgcaactgggcggctttccgcggctgggccttcacgcgccttaagactaaggaaaccccatcactgggctcgggctacgacccttattacacctactctggctctataccctacctagatggaaccttttacctcaaccacacctttaagaaggtggccattacctttgactcttctgtcagctggcctggcaatgaccgcctgcttacccccaacgagtttgaaattaagcgctcagttgacggggagggttacaacgttgcccagtgtaacatgaccaaagactggttcctggtacaaatgctagctaactataacattggctaccagggcttctatatcccagagagctacaaggaccgcatgtactccttctttagaaacttccagcccatgagccgtcaggtggtggatgatactaaatacaaggactaccaacaggtgggcatcctacaccaacacaacaactctggatttgttggctaccttgcccccaccatgcgcgaaggacaggcctaccctgctaacttcccctatccgcttataggcaagaccgcagttgacagcattacccagaaaaagtttctttgcgatcgcaccctttggcgcatcccattctccagtaactttatgtccatgggcgcactcacagacctgggccaaaaccttctctacgccaactccgcccacgcgctagacatgacttttgaggtggatcccatggacgagcccacccttctttatgttttgtttgaagtctttgacgtggtccgtgtgcaccagccgcaccgcggcgtcatcgaaaccgtgtacctgcgcacgcccttctcggccggcaacgccacaacataaagaagcaagcaacatcaacaacagctgccgccatgggctccagtgagcaggaactgaaagccattgtcaaagatcttggttgtgggccatattttttgggcacctatgacaagcgctttccaggctttgtttctccacacaagctcgcctgcgccatagtcaatacggccggtcgcgagactgggggcgtacactggatggcctttgcctggaacccgcactcaaaaacatgctacctctttgagccctttggcttttctgaccagcgactcaagcaggtttaccagtttgagtacgagtcactcctgcgccgtagcgccattgcttcttcccccgaccgctgtataacgctggaaaagtccacccaaagcgtacaggggcccaactcggccgcctgtggactattctgctgcatgtttctccacgcctttgccaactggccccaaactcccatggatcacaaccccaccatgaaccttattaccggggtacccaactccatgctcaacagtccccaggtacagcccaccctgcgtcgcaaccaggaacagctctacagcttcctggagcgccactcgccctacttccgcagccacagtgcgcagattaggagcgccacttctttttgtcacttgaaaaacatgtaaaaataatgtactagagacactttcaataaaggcaaatgcttttatttgtacactctcgggtgattatttacccccacccttgccgtctgcgccgtttaaaaatcaaaggggttctgccgcgcatcgctatgcgccactggcagggacacgttgcgatactggtgtttagtgctccacttaaactcaggcacaaccatccgcggcagctcggtgaagttttcactccacaggctgcgcaccatcaccaacgcgtttagcaggtcgggcgccgatatcttgaagtcgcagttggggcctccgccctgcgcgcgcgagttgcgatacacagggttgcagcactggaacactatcagcgccgggtggtgcacgctggccagcacgctcttgtcggagatcagatccgcgtccaggtcctccgcgttgctcagggcgaacggagtcaactttggtagctgccttcccaaaaagggcgcgtgcccaggctttgagttgcactcgcaccgtagtggcatcaaaaggtgaccgtgcccggtctgggcgttaggatacagcgcctgcataaaagccttgatctgcttaaaagccacctgagcctttgcgccttcagagaagaacatgccgcaagacttgccggaaaactgattggccggacaggccgcgtcgtgcacgcagcaccttgcgtcggtgttggagatctgcaccacatttcggccccaccggttcttcacgatcttggccttgctagactgctccttcagcgcgcgctgcccgttttcgctcgtcacatccatttcaatcacgtgctccttatttatcataatgcttccgtgtagacacttaagctcgccttcgatctcagcgcagcggtgcagccacaacgcgcagcccgtgggctcgtgatgcttgtaggtcacctctgcaaacgactgcaggtacgcctgcaggaatcgccccatcatcgtcacaaaggtcttgttgctggtgaaggtcagctgcaacccgcggtgctcctcgttcagccaggtcttgcatacggccgccagagcttccacttggtcaggcagtagtttgaagttcgcctttagatcgttatccacgtggtacttgtccatcagcgcgcgcgcagcctccatgcccttctcccacgcagacacgatcggcacactcagcgggttcatcaccgtaatttcactttccgcttcgctgggctcttcctcttcctcttgcgtccgcataccacgcgccactgggtcgtcttcattcagccgccgcactgtgcgcttacctcctttgccatgcttgattagcaccggtgggttgctgaaacccaccatttgtagcgccacatcttctctttcttcctcgctgtccacgattacctctggtgatggcgggcgctcgggcttgggagaagggcgcttctttttcttcttgggcgcaatggccaaatccgccgccgaggtcgatggccgcgggctgggtgtgcgcggcaccagcgcgtcttgtgatgagtcttcctcgtcctcggactcgatacgccgcctcatccgcttttttgggggcgcccggggaggcggcggcgacggggacggggacgacacgtcctccatggttgggggacgtcgcgccgcaccgcgtccgcgctcgggggtggtttcgcgctgctcctcttcccgactggccatttccttctcctataggcagaaaaagatcatggagtcagtcgagaagaaggacagcctaaccgccccctctgagttcgccaccaccgcctccaccgatgccgccaacgcgcctaccaccttccccgtcgaggcacccccgcttgaggaggaggaagtgattatcgagcaggacccaggttttgtaagcgaagacgacgaggaccgctcagtaccaacagaggataaaaagcaagaccaggacaacgcagaggcaaacgaggaacaagtcgggcggggggacgaaaggcatggcgactacctagatgtgggagacgacgtgctgttgaagcatctgcagcgccagtgcgccattatctgcgacgcgttgcaagagcgcagcgatgtgcccctcgccatagcggatgtcagccttgcctacgaacgccacctattctcaccgcgcgtaccccccaaacgccaagaaaacggcacatgcgagcccaacccgcgcctcaacttctaccccgtatttgccgtgccagaggtgcttgccacctatcacatctttttccaaaactgcaagatacccctatcctgccgtgccaaccgcagccgagcggacaagcagctggccttgcggcagggcgctgtcatacctgatatcgcctcgctcaacgaagtgccaaaaatctttgagggtcttggacgcgacgagaagcgcgcggcaaacgctctgcaacaggaaaacagcgaaaatgaaagtcactctggagtgttggtggaactcgagggtgacaacgcgcgcctagccgtactaaaacgcagcatcgaggtcacccactttgcctacccggcacttaacctaccccccaaggtcatgagcacagtcatgagtgagctgatcgtgcgccgtgcgcagcccctggagagggatgcaaatttgcaagaacaaacagaggagggcctacccgcagttggcgacgagcagctagcgcgctggcttcaaacgcgcgagcctgccgacttggaggagcgacgcaaactaatgatggccgcagtgctcgttaccgtggagcttgagtgcatgcagcggttctttgctgacccggagatgcagcgcaagctagaggaaacattgcactacacctttcgacagggctacgtacgccaggcctgcaagatctccaacgtggagctctgcaacctggtctcctaccttggaattttgcacgaaaaccgccttgggcaaaacgtgcttcattccacgctcaagggcgaggcgcgccgcgactacgtccgcgactgcgtttacttatttctatgctacacctggcagacggccatgggcgtttggcagcagtgcttggaggagtgcaacctcaaggagctgcagaaactgctaaagcaaaacttgaaggacctatggacggccttcaacgagcgctccgtggccgcgcacctggcggacatcattttccccgaacgcctgcttaaaaccctgcaacagggtctgccagacttcaccagtcaaagcatgttgcagaactttaggaactttatcctagagcgctcaggaatcttgcccgccacctgctgtgcacttcctagcgactttgtgcccattaagtaccgcgaatgccctccgccgctttggggccactgctaccttctgcagctagccaactaccttgcctaccactctgacataatggaagacgtgagcggtgacggtctactggagtgtcactgtcgctgcaacctatgcaccccgcaccgctccctggtttgcaattcgcagctgcttaacgaaagtcaaattatcggtacctttgagctgcagggtccctcgcctgacgaaaagtccgcggctccggggttgaaactcactccggggctgtggacgtcggcttaccttcgcaaatttgtacctgaggactaccacgcccacgagattaggttctacgaagaccaatcccgcccgcctaatgcggagcttaccgcctgcgtcattacccagggccacattcttggccaattgcaagccatcaacaaagcccgccaagagtttctgctacgaaagggacggggggtttacttggacccccagtccggcgaggagctcaacccaatccccccgccgccgcagccctatcagcagcagccgcgggcccttgcttcccaggatggcacccaaaaagaagctgcagctgccgccgccacccacggacgaggaggaatactgggacagtcaggcagaggaggttttggacgaggaggaggaggacatgatggaagactgggagagcctagacgaggaagcttccgaggtcgaagaggtgtcagacgaaacaccgtcaccctcggtcgcattcccctcgccggcgccccagaaatcggcaaccggttccagcatggctacaacctccgctcctcaggcgccgccggcactgcccgttcgccgacccaaccgtagatgggacaccactggaaccagggccggtaagtccaagcagccgccgccgttagcccaagagcaacaacagcgccaaggctaccgctcatggcgcgggcacaagaacgccatagttgcttgcttgcaagactgtgggggcaacatctccttcgcccgccgctttcttctctaccatcacggcgtggccttcccccgtaacatcctgcattactaccgtcatctctacagcccatactgcaccggcggcagcggcagcaacagcagcggccacacagaagcaaaggcgaccggatagcaagactctgacaaagcccaagaaatccacagcggcggcagcagcaggaggaggagcgctgcgtctggcgcccaacgaacccgtatcgacccgcgagcttagaaacaggatttttcccactctgtatgctatatttcaacagagcaggggccaagaacaagagctgaaaataaaaaacaggtctctgcgatccctcacccgcagctgcctgtatcacaaaagcgaagatcagcttcggcgcacgctggaagacgcggaggctctcttcagtaaatactgcgcgctgactcttaaggactagtttcgcgccctttctcaaatttaagcgcgaaaactacgtcatctccagcggccacacccggcgccagcacctgttgtcagcgccattatgagcaaggaaattcccacgccctacatgtggagttaccagccacaaatgggacttgcggctggagctgcccaagactactcaacccgaataaactacatgagcgcgggaccccacatgatatcccgggtcaacggaatacgcgcccaccgaaaccgaattctcctggaacaggcggctattaccaccacacctcgtaataaccttaatccccgtagttggcccgctgccctggtgtaccaggaaagtcccgctcccaccactgtggtacttcccagagacgcccaggccgaagttcagatgactaactcaggggcgcagcttgcgggcggctttcgtcacagggtgcggtcgcccgggcagggtataactcacctgacaatcagagggcgaggtattcagctcaacgacgagtcggtgagctcctcgcttggtctccgtccggacgggacatttcagatcggcggcgccggccgctcttcattcacgcctcgtcaggcaatcctaactctgcagacctcgtcctctgagccgcgctctggaggcattggaactctgcaatttattgaggagtttgtgccatcggtctactttaaccccttctcgggacctcccggccactatccggatcaatttattcctaactttgacgcggtaaaggactcggcggacggctacgactgaatgttaagtggagaggcagagcaactgcgcctgaaacacctggtccactgtcgccgccacaagtgctttgcccgcgactccggtgagttttgctactttgaattgcccgaggatcatatcgagggcccggcgcacggcgtccggcttaccgcccagggagagcttgcccgtagcctgattcgggagtttacccagcgccccctgctagttgagcgggacaggggaccctgtgttctcactgtgatttgcaactgtcctaaccctggattacatcaagatcctctagttaatgtcaggtcgcctaagtcgattaactagagtacccggggatcttattccctttaactaataaaaaaaaataataaagcatcacttacttaaaatcagttagcaaatttctgtccagtttattcagcagcacctccttgccctcctcccagctctggtattgcagcttcctcctggctgcaaactttctccacaatctaaatggaatgtcagtttcctcctgttcctgtccatccgcacccactatcttcatgttgttgcagatgaagcgcgcaagaccgtctgaagataccttcaaccccgtgtatccatatgacacggaaaccggtcctccaactgtgccttttcttactcctccctttgtatcccccaatgggtttcaagagagtccccctggggtactctctttgcgcctatccgaacctctagttacctccaatggcatgcttgcgctcaaaatgggcaacggcctctctctggacgaggccggcaaccttacctcccaaaatgtaaccactgtgagcccacctctcaaaaaaaccaagtcaaacataaacctggaaatatctgcacccctcacagttacctcagaagccctaactgtggctgccgccgcacctctaatggtcgcgggcaacacactcaccatgcaatcacaggccccgctaaccgtgcacgactccaaacttagcattgccacccaaggacccctcacagtgtcagaaggaaagctagccctgcaaacatcaggccccctcaccaccaccgatagcagtacccttactatcactgcctcaccccctctaactactgccactggtagcttgggcattgacttgaaagagcccatttatacacaaaatggaaaactaggactaaagtacggggctcctttgcatgtaacagacgacctaaacactttgaccgtagcaactggtccaggtgtgactattaataatacttccttgcaaactaaagttactggagccttgggttttgattcacaaggcaatatgcaacttaatgtagcaggaggactaaggattgattctcaaaacagacgccttatacttgatgttagttatccgtttgatgctcaaaaccaactaaatctaagactaggacagggccctctttttataaactcagcccacaacttggatattaactacaacaaaggcctttacttgtttacagcttcaaacaattccaaaaagcttgaggttaacctaagcactgccaaggggttgatgtttgacgctacagccatagccattaatgcaggagatgggcttgaatttggttcacctaatgcaccaaacacaaatcccctcaaaacaaaaattggccatggcctagaatttgattcaaacaaggctatggttcctaaactaggaactggccttagttttgacagcacaggtgccattacagtaggaaacaaaaataatgataagctaactttgtggaccggaataaaccctccacctaactgtcaaattgtggaaaacactaatacaaatgatggcaaacttactttagtattagtaaaaaatggagggcttgttaatggctacgtgtctctagttggtgtatcagacactgtgaaccaaatgttcacacaaaagacagcaaacatccaattaagattatattttgactcttctggaaatctattaactgaggaatcagacttaaaaattccacttaaaaataaatcttctacagcgaccagtgaaactgtagccagcagcaaagcctttatgccaagtactacagcttatcccttcaacaccactactagggatagtgaaaactacattcatggaatatgttactacatgactagttatgatagaagtctatttcccttgaacatttctataatgctaaacagccgtatgatttcttccaatgttgcctatgccatacaatttgaatggaatctaaatgcaagtgaatctccagaaagcaacatagctacgctgaccacatccccctttttcttttcttacattacagaagacgacaactaaagaatcgtttgtgttatgtttcaacgtgtttatttttcaattgcagaaaatttcaagtcatttttcattcagtagtatagccccaccaccacatagcttatacagatcaccgtaccttaatcaaactcacagaaccctagtattcaacctgccacctccctcccaacacacagagtacacagtcctttctccccggctggccttaaaaagcatcatatcatgggtaacagacatattcttaggtgttatattccacacggtttcctgtcgagccaaacgctcatcagtgatattaataaactccccgggcagctcacttaagttcatgtcgctgtccagctgctgagccacaggctgctgtccaacttgcggttgcttaacgggcggcgaaggagaagtccacgcgttgtgcattgtcaaagtgttacattcgggcagcagcggatgatcctccagtatggtagcgcgggtttctgtctcaaaaggaggtagacgatccctactgtacggagtgcgccgagacaaccgagatcgtgttggtcgtagtgtcatgccaaatggaacgccggacgtagtcatatttcctgaagcaaaaccaggtgcgggcgtgacaaacagatctgcgtctccggtctcgccgcttagatcgctctgtgtagtagttgtagtatatccactctctcaaagcatccaggcgccccctggcttcgggttctatgtaaactccttcatgcgccgctgccctgataacatccaccaccgcagaataagccacacccagccaacctacacattcgttctgcgagtcacacacgggaggagcgggaagagctggaagaaccatgtttttttttttattccaaaagattatccaaaacctcaaaatgaagatctattaagtgaacgcgctcccctccggtggcgtggtcaaactctacagccaaagaacagataatggcatttgtaagatgttgcacaatggcttccaaaaggcaaacggccctcacgtccaagtggacgtaaaggctaaacccttcagggtgaatctcctctataaacattccagcaccttcaaccatgcccaaataattctcatctcgccaccttctcaatatatctctaagcaaatcccgaatattaagtccggccattgtaaaaatctgctccagagcgccctccaccttcagcctcaagcagcgaatcatgattgcaaaaattcaggttcctcacagacctgtataagattcaaaagcggaacattaacaaaaataccgcgatcccgtaggtcccttcgcagggccagctgaacataatcgtgcaggtctgcacggaccagcgcggccacttccccgccaggaaccatgacaaaagaacccacactgattatgacacgcatactcggagctatgctaaccagcgtagccccgatgtaagcttgttgcatgggcggcgatataaaatgcaaggtgctgctcaaaaaatcaggcaaagcctcgcgcaaaaaagaaagcacatcgtagtcatgctcatgcagataaaggcaggtaagctccggaaccaccacagaaaaagacaccatttttctctcaaacatgtctgcgggtttctgcataaacacaaaataaaataacaaaaaaacatttaaacattagaagcctgtcttacaacaggaaaaacaacccttataagcataagacggactacggccatgccggcgtgaccgtaaaaaaactggtcaccgtgattaaaaagcaccaccgacagctcctcggtcatgtccggagtcataatgtaagactcggtaaacacatcaggttgattcacatcggtcagtgctaaaaagcgaccgaaatagcccgggggaatacatacccgcaggcgtagagacaacattacagcccccataggaggtataacaaaattaataggagagaaaaacacataaacacctgaaaaaccctcctgcctaggcaaaatagcaccctcccgctccagaacaacatacagcgcttccacagcggcagccataacagtcagccttaccagtaaaaaagaaaacctattaaaaaaacaccactcgacacggcaccagctcaatcagtcacagtgtaaaaaagggccaagtgcagagcgagtatatataggactaaaaaatgacgtaacggttaaagtccacaaaaaacacccagaaaaccgcacgcgaacctacgcccagaaacgaaagccaaaaaacccacaacttcctcaaatcgtcacttccgttttcccacgttacgtcacttcccattttaagaaaactacaattcccaacacatacaagttactccgccctaaaacctacgtcacccgccccgttcccacgccccgcgccacgtcacaaactccaccccctcattatcatattggcttcaatccaaaataaggtatattattgatgatg

SEQ ID NO: 32 - DNA, 35734 bp, Artificial Sequence
  Adk35F2-Spike/E4orf6(CMV)-E4dl-711(E4re#30)
ttaattaacatcatcaataatataccttattttggattgaagccaatatgataatgagggggtggagtttgtgacgtggcgcggggcgtgggaacggggcgggtgacgtagtagtgtggcggaagtgtgatgttgcaagtgtggcggaacacatgtaagcgacggatgtggcaaaagtgacgtttttggtgtgcgccggtgtacacaggaagtgacaattttcgcgcggttttaggcggatgttgtagtaaatttgggcgtaaccgagtaagatttggccattttcgcgggaaaactgaataagaggaagtgaaatctgaataattttgtgttactcatagcgcgtaataatttctgtaatagtaatcaattacggggtcattagttcatagcccatatatggagttccgcgttacataacttacggtaaatggcccgcctggctgaccgcccaacgacccccgcccattgacgtcaataatgacgtatgttcccatagtaacgccaatagggactttccattgacgtcaatgggtggagtatttacggtaaactgcccacttggcagtacatcaagtgtatcatatgccaagtacgccccctattgacgtcaatgacggtaaatggcccgcctggcattatgcccagtacatgaccttatgggactttcctacttggcagtacatctacgtattagtcatcgctattaccatggtgatgcggttttggcagtacatcaatgggcgtggatagcggtttgactcacggggatttccaagtctccaccccattgacgtcaatgggagtttgttttggcaccaaaatcaacgggactttccaaaatgtcgtaacaactccgccccattgacgcaaatgggcggtaggcgtgtacggtgggaggtctatataagcagagctctccctatcagtgatagagatctccctatcagtgatagagatcgtcgacgagctcgtttagtgaaccgtcagatcgcctggagacgccatccacgctgttttgacctccatagaagacaccgggaccgatccagcctccgatttgccaccatgtttgtgttcctggtgctgctgccactggtgtccagccagtgtgtgaacctgaccaccaggacccaacttcctcctgcctacaccaactccttcaccaggggagtctactaccctgacaaggtgttcaggtcctctgtgctgcacagcacccaggacctgttcctgccattcttcagcaatgtgacctggttccatgccatccatgtgtctggcaccaatggcaccaagaggtttgacaaccctgtgctgccattcaatgatggagtctactttgccagcacagagaagagcaacatcatcaggggctggatttttggcaccaccctggacagcaagacccagtccctgctgattgtgaacaatgccaccaatgtggtgattaaggtgtgtgagttccagttctgtaatgacccattcctgggagtctactaccacaagaacaacaagtcctggatggagtctgagttcagggtctactcctctgccaacaactgtacctttgaatatgtgagccaaccattcctgatggacttggagggcaagcagggcaacttcaagaacctgagggagtttgtgttcaagaacattgatggctacttcaagatttacagcaaacacacaccaatcaacctggtgagggacctgccacagggcttctctgccttggaaccactggtggacctgccaattggcatcaacatcaccaggttccagaccctgctggctctgcacaggtcctacctgacacctggagactcctcctctggctggacagcaggagcagcagcctactatgtgggctacctccaaccaaggaccttcctgctgaaatacaatgagaatggcaccatcacagatgctgtggactgtgccctggacccactgtctgagaccaagtgtaccctgaaatccttcacagtggagaagggcatctaccagaccagcaacttcagggtccaaccaacagagagcattgtgaggtttccaaacatcaccaacctgtgtccatttggagaggtgttcaatgccaccaggtttgcctctgtctatgcctggaacaggaagaggattagcaactgtgtggctgactactctgtgctctacaactctgcctccttcagcaccttcaagtgttatggagtgagcccaaccaaactgaatgacctgtgtttcaccaatgtctatgctgactcctttgtgattaggggagatgaggtgagacagattgcccctggacaaacaggcaagattgctgactacaactacaaactgcctgatgacttcacaggctgtgtgattgcctggaacagcaacaacctggacagcaaggtgggaggcaactacaactacctctacagactgttcaggaagagcaacctgaaaccatttgagagggacatcagcacagagatttaccaggctggcagcacaccatgtaatggagtggagggcttcaactgttactttccactccaatcctatggcttccaaccaaccaatggagtgggctaccaaccatacagggtggtggtgctgtcctttgaactgctccatgcccctgccacagtgtgtggaccaaagaagagcaccaacctggtgaagaacaagtgtgtgaacttcaacttcaatggactgacaggcacaggagtgctgacagagagcaacaagaagttcctgccattccaacagtttggcagggacattgctgacaccacagatgctgtgagggacccacagaccttggagattctggacatcacaccatgttcctttggaggagtgtctgtgattacacctggcaccaacaccagcaaccaggtggctgtgctctaccaggatgtgaactgtactgaggtgcctgtggctatccatgctgaccaacttacaccaacctggagggtctacagcacaggcagcaatgtgttccagaccagggctggctgtctgattggagcagagcatgtgaacaactcctatgagtgtgacatcccaattggagcaggcatctgtgcctcctaccagacccagaccggtggcggtgggtcgaggtctgtggcaagccagagcatcattgcctacacaatgagtctgggagcagagaactctgtggcttacagcaacaacagcattgccatcccaaccaacttcaccatctctgtgaccacagagattctgcctgtgagtatgaccaagacctctgtggactgtacaatgtatatctgtggagacagcacagagtgtagcaacctgctgctccaatatggctccttctgtacccaacttaacagggctctgacaggcattgctgtggaacaggacaagaacacccaggaggtgtttgcccaggtgaagcagatttacaagacacctccaatcaaggactttggaggcttcaacttcagccagattctgcctgacccaagcaagccaagcaagaggtccttcattgaggacctgctgttcaacaaggtgaccctggctgatgctggcttcatcaagcaatatggagactgtctgggagacattgctgccagggacctgatttgtgcccagaagttcaatggactgacagtgctgcctccactgctgacagatgagatgattgcccaatacacctctgccctgctggctggcaccatcacctctggctggacctttggagcaggagcagccctccaaatcccatttgctatgcagatggcttacaggttcaatggcattggagtgacccagaatgtgctctatgagaaccagaaactgattgccaaccagttcaactctgccattggcaagattcaggactccctgtccagcacagcctctgccctgggcaaactccaagatgtggtgaaccagaatgcccaggctctgaacaccctggtgaagcaactttccagcaactttggagccatctcctctgtgctgaatgacatcctgagcagactggacaaggtggaggctgaggtccagattgacagactgattacaggcagactccaatccctccaaacctatgtgacccaacaacttatcagggctgctgagattagggcatctgccaacctggctgccaccaagatgagtgagtgtgtgctgggacaaagcaagagggtggacttctgtggcaagggctaccacctgatgagttttccacagtctgcccctcatggagtggtgttcctgcatgtgacctatgtgcctgcccaggagaagaacttcaccacagcccctgccatctgccatgatggcaaggctcactttccaagggagggagtgtttgtgagcaatggcacccactggtttgtgacccagaggaacttctatgaaccacagattatcaccacagacaacacctttgtgtctggcaactgtgatgtggtgattggcattgtgaacaacacagtctatgacccactccaacctgaactggactccttcaaggaggaactggacaaatacttcaagaaccacaccagccctgatgtggacctgggagacatctctggcatcaatgcctctgtggtgaacatccagaaggagattgacagactgaatgaggtggctaagaacctgaatgagtccctgattgacctccaagaactgggcaaatatgaacaatacatcaagtggccatgaaaattgatcataatcagccataccacatttgtagaggttttacttgctttaaaaaacctcccacacctccccctgaacctgaaacataaaatgaatgcaattgttgttgttaacttgtttattgcagcttataatggttacaaataaagcaatagcatcacaaatttcacaaataaagcatttttttcactgcattctagttgtggtttgtccaaactcatcaatgtatcttaacgcggatccgttacataacttacggtaaatggcccgcctggctgaccgcccaacgacccccgcccattgacgtcaataatgacgtatgttcccatagtaacgccaatagggactttccattgacgtcaatgggtggagtatttacggtaaactgcccacttggcagtacatcaagtgtatcatatgccaagtacgccccctattgacgtcaatgacggtaaatggcccgcctggcattatgcccagtacatgaccttatgggactttcctacttggcagtacatctacgtattagtcatcgctattaccatggtgatgcggttttggcagtacatcaatgggcgtggatagcggtttgactcacggggatttccaagtctccaccccattgacgtcaatgggagtttgttttggcaccaaaatcaacgggactttccaaaatgtcgtaacaactccgccccattgacgcaaatgggcggtaggcgtgtacggtgggaggtctatataagcagagctaaactaccccaagctggccaccatgactacgtccggcgttccatttggcatgacactacgaccaacacgatctcggttgtctcggcgcactccgtacagtagggatcgtctacctccttttgagacagaaacccgcgctaccatactggaggatcatccgctgctgcccgaatgtaacactttgacaatgcacaacgtgagttacgtgcgaggtcttccctgcagtgtgggatttacgctgattcaggaatgggttgttccctgggatatggttctaacgcgggaggagcttgtaatcctgaggaagtgtatgcacgtgtgcctgtgttgtgccaacattgatatcatgacgagcatgatgatccatggttacgagtcctgggctctccactgtcattgttccagtcccggttccctgcagtgtatagccggcgggcaggttttggccagctggtttaggatggtggtggatggcgccatgtttaatcagaggtttatatggtaccgggaggtggtgaattacaacatgccaaaagaggtaatgtttatgtccagcgtgtttatgaggggtcgccacttaatctacctgcgcttgtggtatgatggccacgtgggttctgtggtccccgccatgagctttggatacagcgccttgcactgtgggattttgaacaatattgtggtgctgtgctgcagttactgtgctgatttaagtgagatcagggtgcgctgctgtgcccggaggacaaggcgccttatgctgcgggcggtgcgaatcatcgctgaggagaccactgccatgttgtattcctgcaggacggagcggcggcggcagcagtttattcgcgcgctgctgcagcaccaccgccctatcctgatgcacgattatgactctacccccatgtagaagcttggggatcaattctctagagctcgctgatcagcctcgactgtgccttctagttgccagccatctgttgtttgcccctcccccgtgccttccttgaccctggaaggtgccactcccactgtcctttcctaataaaatgaggaaattgcatcgcattgtctgagtaggtgtcattctattctggggggtggggtggggcaggacagcaagggggaggattgggaagacaatagcaggcatgctggggatgcggtgggctctatggcttctgaggaaattgggcgtggcttaagggtgggaaagaatatataaggtgggggtcttatgtagttttgtatctgttttgcagcagccgccgccgccatgagcaccaactcgtttgatggaagcattgtgagctcatatttgacaacgcgcatgcccccatgggccggggtgcgtcagaatgtgatgggctccagcattgatggtcgccccgtcctgcccgcaaactctactaccttgacctacgagaccgtgtctggaacgccgttggagactgcagcctccgccgccgcttcagccgctgcagccaccgcccgcgggattgtgactgactttgctttcctgagcccgcttgcaagcagtgcagcttcccgttcatccgcccgcgatgacaagttgacggctcttttggcacaattggattctttgacccgggaacttaatgtcgtttctcagcagctgttggatctgcgccagcaggtttctgccctgaaggcttcctcccctcccaatgcggtttaaaacataaataaaaaaccagactctgtttggatttggatcaagcaagtgtcttgctgtctttatttaggggttttgcgcgcgcggtaggcccgggaccagcggtctcggtcgttgagggtcctgtgtattttttccaggacgtggtaaaggtgactctggatgttcagatacatgggcataagcccgtctctggggtggaggtagcaccactgcagagcttcatgctgcggggtggtgttgtagatgatccagtcgtagcaggagcgctgggcgtggtgcctaaaaatgtctttcagtagcaagctgattgccaggggcaggcccttggtgtaagtgtttacaaagcggttaagctgggatgggtgcatacgtggggatatgagatgcatcttggactgtatttttaggttggctatgttcccagccatatccctccggggattcatgttgtgcagaaccaccagcacagtgtatccggtgcacttgggaaatttgtcatgtagcttagaaggaaatgcgtggaagaacttggagacgcccttgtgacctccaagattttccatgcattcgtccataatgatggcaatgggcccacgggcggcggcctgggcgaagatatttctgggatcactaacgtcatagttgtgttccaggatgagatcgtcataggccatttttacaaagcgcgggcggagggtgccagactgcggtataatggttccatccggcccaggggcgtagttaccctcacagatttgcatttcccacgctttgagttcagatggggggatcatgtctacctgcggggcgatgaagaaaacggtttccggggtaggggagatcagctgggaagaaagcaggttcctgagcagctgcgacttaccgcagccggtgggcccgtaaatcacacctattaccgggtgcaactggtagttaagagagctgcagctgccgtcatccctgagcaggggggccacttcgttaagcatgtccctgactcgcatgttttccctgaccaaatccgccagaaggcgctcgccgcccagcgatagcagttcttgcaaggaagcaaagtttttcaacggtttgagaccgtccgccgtaggcatgcttttgagcgtttgaccaagcagttccaggcggtcccacagctcggtcacctgctctacggcatctcgatccagcatatctcctcgtttcgcgggttggggcggctttcgctgtacggcagtagtcggtgctcgtccagacgggccagggtcatgtctttccacgggcgcagggtcctcgtcagcgtagtctgggtcacggtgaaggggtgcgctccgggctgcgcgctggccagggtgcgcttgaggctggtcctgctggtgctgaagcgctgccggtcttcgccctgcgcgtcggccaggtagcatttgaccatggtgtcatagtccagcccctccgcggcgtggcccttggcgcgcagcttgcccttggaggaggcgccgcacgaggggcagtgcagacttttgagggcgtagagcttgggcgcgagaaataccgattccggggagtaggcatccgcgccgcaggccccgcagacggtctcgcattccacgagccaggtgagctctggccgttcggggtcaaaaaccaggtttcccccatgctttttgatgcgtttcttacctctggtttccatgagccggtgtccacgctcggtgacgaaaaggctgtccgtgtccccgtatacagacttgagaggcctgtcctcgagcggtgttccgcggtcctcctcgtatagaaactcggaccactctgagacaaaggctcgcgtccaggccagcacgaaggaggctaagtgggaggggtagcggtcgttgtccactagggggtccactcgctccagggtgtgaagacacatgtcgccctcttcggcatcaaggaaggtgattggtttgtaggtgtaggccacgtgaccgggtgttcctgaaggggggctataaaagggggtgggggcgcgttcgtcctcactctcttccgcatcgctgtctgcgagggccagctgttggggtgagtactccctctgaaaagcgggcatgacttctgcgctaagattgtcagtttccaaaaacgaggaggatttgatattcacctggcccgcggtgatgcctttgagggtggccgcatccatctggtcagaaaagacaatctttttgttgtcaagcttggtggcaaacgacccgtagagggcgttggacagcaacttggcgatggagcgcagggtttggtttttgtcgcgatcggcgcgctccttggccgcgatgtttagctgcacgtattcgcgcgcaacgcaccgccattcgggaaagacggtggtgcgctcgtcgggcaccaggtgcacgcgccaaccgcggttgtgcagggtgacaaggtcaacgctggtggctacctctccgcgtaggcgctcgttggtccagcagaggcggccgcccttgcgcgagcagaatggcggtagggggtctagctgcgtctcgtccggggggtctgcgtccacggtaaagaccccgggcagcaggcgcgcgtcgaagtagtctatcttgcatccttgcaagtctagcgcctgctgccatgcgcgggcggcaagcgcgcgctcgtatgggttgagtgggggaccccatggcatggggtgggtgagcgcggaggcgtacatgccgcaaatgtcgtaaacgtagaggggctctctgagtattccaagatatgtagggtagcatcttccaccgcggatgctggcgcgcacgtaatcgtatagttcgtgcgagggagcgaggaggtcgggaccgaggttgctacgggcgggctgctctgctcggaagactatctgcctgaagatggcatgtgagttggatgatatggttggacgctggaagacgttgaagctggcgtctgtgagacctaccgcgtcacgcacgaaggaggcgtaggagtcgcgcagcttgttgaccagctcggcggtgacctgcacgtctagggcgcagtagtccagggtttccttgatgatgtcatacttatcctgtcccttttttttccacagctcgcggttgaggacaaactcttcgcggtctttccagtactcttggatcggaaacccgtcggcctccgaacggtaagagcctagcatgtagaactggttgacggcctggtaggcgcagcatcccttttctacgggtagcgcgtatgcctgcgcggccttccggagcgaggtgtgggtgagcgcaaaggtgtccctgaccatgactttgaggtactggtatttgaagtcagtgtcgtcgcatccgccctgctcccagagcaaaaagtccgtgcgctttttggaacgcggatttggcagggcgaaggtgacatcgttgaagagtatctttcccgcgcgaggcataaagttgcgtgtgatgcggaagggtcccggcacctcggaacggttgttaattacctgggcggcgagcacgatctcgtcaaagccgttgatgttgtggcccacaatgtaaagttccaagaagcgcgggatgcccttgatggaaggcaattttttaagttcctcgtaggtgagctcttcaggggagctgagcccgtgctctgaaagggcccagtctgcaagatgagggttggaagcgacgaatgagctccacaggtcacgggccattagcatttgcaggtggtcgcgaaaggtcctaaactggcgacctatggccattttttctggggtgatgcagtagaaggtaagcgggtcttgttcccagcggtcccatccaaggttcgcggctaggtctcgcgcggcagtcactagaggctcatctccgccgaacttcatgaccagcatgaagggcacgagctgcttcccaaaggcccccatccaagtataggtctctacatcgtaggtgacaaagagacgctcggtgcgaggatgcgagccgatcgggaagaactggatctcccgccaccaattggaggagtggctattgatgtggtgaaagtagaagtccctgcgacgggccgaacactcgtgctggcttttgtaaaaacgtgcgcagtactggcagcggtgcacgggctgtacatcctgcacgaggttgacctgacgaccgcgcacaaggaagcagagtgggaatttgagcccctcgcctggcgggtttggctggtggtcttctacttcggctgcttgtccttgaccgtctggctgctcgaggggagttacggtggatcggaccaccacgccgcgcgagcccaaagtccagatgtccgcgcgcggcggtcggagcttgatgacaacatcgcgcagatgggagctgtccatggtctggagctcccgcggcgtcaggtcaggcgggagctcctgcaggtttacctcgcatagacgggtcagggcgcgggctagatccaggtgatacctaatttccaggggctggttggtggcggcgtcgatggcttgcaagaggccgcatccccgcggcgcgactacggtaccgcgcggcgggcggtgggccgcgggggtgtccttggatgatgcatctaaaagcggtgacgcgggcgagcccccggaggtagggggggctccggacccgccgggagagggggcaggggcacgtcggcgccgcgcgcgggcaggagctggtgctgcgcgcgtaggttgctggcgaacgcgacgacgcggcggttgatctcctgaatctggcgcctctgcgtgaagacgacgggcccggtgagcttgaacctgaaagagagttcgacagaatcaatttcggtgtcgttgacggcggcctggcgcaaaatctcctgcacgtctcctgagttgtcttgataggcgatctcggccatgaactgctcgatctcttcctcctggagatctccgcgtccggctcgctccacggtggcggcgaggtcgttggaaatgcgggccatgagctgcgagaaggcgttgaggcctccctcgttccagacgcggctgtagaccacgcccccttcggcatcgcgggcgcgcatgaccacctgcgcgagattgagctccacgtgccgggcgaagacggcgtagtttcgcaggcgctgaaagaggtagttgagggtggtggcggtgtgttctgccacgaagaagtacataacccagcgtcgcaacgtggattcgttgatatcccccaaggcctcaaggcgctccatggcctcgtagaagtccacggcgaagttgaaaaactgggagttgcgcgccgacacggttaactcctcctccagaagacggatgagctcggcgacagtgtcgcgcacctcgcgctcaaaggctacaggggcctcttcttcttcttcaatctcctcttccataagggcctccccttcttcttcttctggcggcggtgggggaggggggacacggcggcgacgacggcgcaccgggaggcggtcgacaaagcgctcgatcatctccccgcggcgacggcgcatggtctcggtgacggcgcggccgttctcgcgggggcgcagttggaagacgccgcccgtcatgtcccggttatgggttggcggggggctgccatgcggcagggatacggcgctaacgatgcatctcaacaattgttgtgtaggtactccgccgccgagggacctgagcgagtccgcatcgaccggatcggaaaacctctcgagaaaggcgtctaaccagtcacagtcgcaaggtaggctgagcaccgtggcgggcggcagcgggcggcggtcggggttgtttctggcggaggtgctgctgatgatgtaattaaagtaggcggtcttgagacggcggatggtcgacagaagcaccatgtccttgggtccggcctgctgaatgcgcaggcggtcggccatgccccaggcttcgttttgacatcggcgcaggtctttgtagtagtcttgcatgagcctttctaccggcacttcttcttctccttcctcttgtcctgcatctcttgcatctatcgctgcggcggcggcggagtttggccgtaggtggcgccctcttcctcccatgcgtgtgaccccgaagcccctcatcggctgaagcagggctaggtcggcgacaacgcgctcggctaatatggcctgctgcacctgcgtgagggtagactggaagtcatccatgtccacaaagcggtggtatgcgcccgtgttgatggtgtaagtgcagttggccataacggaccagttaacggtctggtgacccggctgcgagagctcggtgtacctgagacgcgagtaagccctcgagtcaaatacgtagtcgttgcaagtccgcaccaggtactggtatcccaccaaaaagtgcggcggcggctggcggtagaggggccagcgtagggtggccggggctccgggggcgagatcttccaacataaggcgatgatatccgtagatgtacctggacatccaggtgatgccggcggcggtggtggaggcgcgcggaaagtcgcggacgcggttccagatgttgcgcagcggcaaaaagtgctccatggtcgggacgctctggccggtcaggcgcgcgcaatcgttgacgctctagcgtgcaaaaggagagcctgtaagcgggcactcttccgtggtctggtggataaattcgcaagggtatcatggcggacgaccggggttcgagccccgtatccggccgtccgccgtgatccatgcggttaccgcccgcgtgtcgaacccaggtgtgcgacgtcagacaacgggggagtgctccttttggcttccttccaggcgcggcggctgctgcgctagcttttttggccactggccgcgcgcagcgtaagcggttaggctggaaagcgaaagcattaagtggctcgctccctgtagccggagggttattttccaagggttgagtcgcgggacccccggttcgagtctcggaccggccggactgcggcgaacgggggtttgcctccccgtcatgcaagaccccgcttgcaaattcctccggaaacagggacgagccccttttttgcttttcccagatgcatccggtgctgcggcagatgcgcccccctcctcagcagcggcaagagcaagagcagcggcagacatgcagggcaccctcccctcctcctaccgcgtcaggaggggcgacatccgcggttgacgcggcagcagatggtgattacgaacccccgcggcgccgggcccggcactacctggacttggaggagggcgagggcctggcgcggctaggagcgccctctcctgagcggcacccaagggtgcagctgaagcgtgatacgcgtgaggcgtacgtgccgcggcagaacctgtttcgcgaccgcgagggagaggagcccgaggagatgcgggatcgaaagttccacgcagggcgcgagctgcggcatggcctgaatcgcgagcggttgctgcgcgaggaggactttgagcccgacgcgcgaaccgggattagtcccgcgcgcgcacacgtggcggccgccgacctggtaaccgcatacgagcagacggtgaaccaggagattaactttcaaaaaagctttaacaaccacgtgcgtacgcttgtggcgcgcgaggaggtggctataggactgatgcatctgtgggactttgtaagcgcgctggagcaaaacccaaatagcaagccgctcatggcgcagctgttccttatagtgcagcacagcagggacaacgaggcattcagggatgcgctgctaaacatagtagagcccgagggccgctggctgctcgatttgataaacatcctgcagagcatagtggtgcaggagcgcagcttgagcctggctgacaaggtggccgccatcaactattccatgcttagcctgggcaagttttacgcccgcaagatataccataccccttacgttcccatagacaaggaggtaaagatcgaggggttctacatgcgcatggcgctgaaggtgcttaccttgagcgacgacctgggcgtttatcgcaacgagcgcatccacaaggccgtgagcgtgagccggcggcgcgagctcagcgaccgcgagctgatgcacagcctgcaaagggccctggctggcacgggcagcggcgatagagaggccgagtcctactttgacgcgggcgctgacctgcgctgggccccaagccgacgcgccctggaggcagctggggccggacctgggctggcggtggcacccgcgcgcgctggcaacgtcggcggcgtggaggaatatgacgaggacgatgagtacgagccagaggacggcgagtactaagcggtgatgtttctgatcagatgatgcaagacgcaacggacccggcggtgcgggcggcgctgcagagccagccgtccggccttaactccacggacgactggcgccaggtcatggaccgcatcatgtcgctgactgcgcgcaatcctgacgcgttccggcagcagccgcaggccaaccggctctccgcaattctggaagcggtggtcccggcgcgcgcaaaccccacgcacgagaaggtgctggcgatcgtaaacgcgctggccgaaaacagggccatccggcccgacgaggccggcctggtctacgacgcgctgcttcagcgcgtggctcgttacaacagcggcaacgtgcagaccaacctggaccggctggtgggggatgtgcgcgaggccgtggcgcagcgtgagcgcgcgcagcagcagggcaacctgggctccatggttgcactaaacgccttcctgagtacacagcccgccaacgtgccgcggggacaggaggactacaccaactttgtgagcgcactgcggctaatggtgactgagacaccgcaaagtgaggtgtaccagtctgggccagactattttttccagaccagtagacaaggcctgcagaccgtaaacctgagccaggctttcaaaaacttgcaggggctgtggggggtgcgggctcccacaggcgaccgcgcgaccgtgtctagcttgctgacgcccaactcgcgcctgttgctgctgctaatagcgcccttcacggacagtggcagcgtgtcccgggacacatacctaggtcacttgctgacactgtaccgcgaggccataggtcaggcgcatgtggacgagcatactttccaggagattacaagtgtcagccgcgcgctggggcaggaggacacgggcagcctggaggcaaccctaaactacctgctgaccaaccggcggcagaagatcccctcgttgcacagtttaaacagcgaggaggagcgcattttgcgctacgtgcagcagagcgtgagccttaacctgatgcgcgacggggtaacgcccagcgtggcgctggacatgaccgcgcgcaacatggaaccgggcatgtatgcctcaaaccggccgtttatcaaccgcctaatggactacttgcatcgcgcggccgccgtgaaccccgagtatttcaccaatgccatcttgaacccgcactggctaccgccccctggtttctacaccgggggattcgaggtgcccgagggtaacgatggattcctctgggacgacatagacgacagcgtgttttccccgcaaccgcagaccctgctagagttgcaacagcgcgagcaggcagaggcggcgctgcgaaaggaaagcttccgcaggccaagcagcttgtccgatctaggcgctgcggccccgcggtcagatgctagtagcccatttccaagcttgatagggtctcttaccagcactcgcaccacccgcccgcgcctgctgggcgaggaggagtacctaaacaactcgctgctgcagccgcagcgcgaaaaaaacctgcctccggcatttcccaacaacgggatagagagcctagtggacaagatgagtagatggaagacgtacgcgcaggagcacagggacgtgccaggcccgcgcccgcccacccgtcgtcaaaggcacgaccgtcagcggggtctggtgtgggaggacgatgactcggcagacgacagcagcgtcctggatttgggagggagtggcaacccgtttgcgcaccttcgccccaggctggggagaatgttttaaaaaaaaaaaagcatgatgcaaaataaaaaactcaccaaggccatggcaccgagcgttggttttcttgtattccccttagtatgcggcgcgcggcgatgtatgaggaaggtcctcctccctcctacgagagtgtggtgagcgcggcgccagtggcggcggcgctgggttctcccttcgatgctcccctggacccgccgtttgtgcctccgcggtacctgcggcctaccggggggagaaacagcatccgttactctgagttggcacccctattcgacaccacccgtgtgtacctggtggacaacaagtcaacggatgtggcatccctgaactaccagaacgaccacagcaactttctgaccacggtcattcaaaacaatgactacagcccgggggaggcaagcacacagaccatcaatcttgacgaccggtcgcactggggcggcgacctgaaaaccatcctgcataccaacatgccaaatgtgaacgagttcatgtttaccaataagtttaaggcgcgggtgatggtgtcgcgcttgcctactaaggacaatcaggtggagctgaaatacgagtgggtggagttcacgctgcccgagggcaactactccgagaccatgaccatagaccttatgaacaacgcgatcgtggagcactacttgaaagtgggcagacagaacggggttctggaaagcgacatcggggtaaagtttgacacccgcaacttcagactggggtttgaccccgtcactggtcttgtcatgcctggggtatatacaaacgaagccttccatccagacatcattttgctgccaggatgcggggtggacttcacccacagccgcctgagcaacttgttgggcatccgcaagcggcaacccttccaggagggctttaggatcacctacgatgatctggagggtggtaacattcccgcactgttggatgtggacgcctaccaggcgagcttgaaagatgacaccgaacagggcgggggtggcgcaggcggcagcaacagcagtggcagcggcgcggaagagaactccaacgcggcagccgcggcaatgcagccggtggaggacatgaacgatcatgccattcgcggcgacacctttgccacacgggctgaggagaagcgcgctgaggccgaagcagcggccgaagctgccgcccccgctgcgcaacccgaggtcgagaagcctcagaagaaaccggtgatcaaacccctgacagaggacagcaagaaacgcagttacaacctaataagcaatgacagcaccttcacccagtaccgcagctggtaccttgcatacaactacggcgaccctcagaccggaatccgctcatggaccctgctttgcactcctgacgtaacctgcggctcggagcaggtctactggtcgttgccagacatgatgcaagaccccgtgaccttccgctccacgcgccagatcagcaactttccggtggtgggcgccgagctgttgcccgtgcactccaagagcttctacaacgaccaggccgtctactcccaactcatccgccagtttacctctctgacccacgtgttcaatcgctttcccgagaaccagattttggcgcgcccgccagcccccaccatcaccaccgtcagtgaaaacgttcctgctctcacagatcacgggacgctaccgctgcgcaacagcatcggaggagtccagcgagtgaccattactgacgccagacgccgcacctgcccctacgtttacaaggccctgggcatagtctcgccgcgcgtcctatcgagccgcactttttgagcaagcatgtccatccttatatcgcccagcaataacacaggctggggcctgcgcttcccaagcaagatgtttggcggggccaagaagcgctccgaccaacacccagtgcgcgtgcgcgggcactaccgcgcgccctggggcgcgcacaaacgcggccgcactgggcgcaccaccgtcgatgacgccatcgacgcggtggtggaggaggcgcgcaactacacgcccacgccgccaccagtgtccacagtggacgcggccattcagaccgtggtgcgcggagcccggcgctatgctaaaatgaagagacggcggaggcgcgtagcacgtcgccaccgccgccgacccggcactgccgcccaacgcgcggcggcggccctgcttaaccgcgcacgtcgcaccggccgacgggcggccatgcgggccgctcgaaggctggccgcgggtattgtcactgtgccccccaggtccaggcgacgagcggccgccgcagcagccgcggccattagtgctatgactcagggtcgcaggggcaacgtgtattgggtgcgcgactcggttagcggcctgcgcgtgcccgtgcgcacccgccccccgcgcaactagattgcaagaaaaaactacttagactcgtactgttgtatgtatccagcggcggcggcgcgcaacgaagctatgtccaagcgcaaaatcaaagaagagatgctccaggtcatcgcgccggagatctatggccccccgaagaaggaagagcaggattacaagccccgaaagctaaagcgggtcaaaaagaaaaagaaagatgatgatgatgaacttgacgacgaggtggaactgctgcacgctaccgcgcccaggcgacgggtacagtggaaaggtcgacgcgtaaaacgtgttttgcgacccggcaccaccgtagtctttacgcccggtgagcgctccacccgcacctacaagcgcgtgtatgatgaggtgtacggcgacgaggacctgcttgagcaggccaacgagcgcctcggggagtttgcctacggaaagcggcataaggacatgctggcgttgccgctggacgagggcaacccaacacctagcctaaagcccgtaacactgcagcaggtgctgcccgcgcttgcaccgtccgaagaaaagcgcggcctaaagcgcgagtctggtgacttggcacccaccgtgcagctgatggtacccaagcgccagcgactggaagatgtcttggaaaaaatgaccgtggaacctgggctggagcccgaggtccgcgtgcggccaatcaagcaggtggcgccgggactgggcgtgcagaccgtggacgttcagatacccactaccagtagcaccagtattgccaccgccacagagggcatggagacacaaacgtccccggttgcctcagcggtggcggatgccgcggtgcaggcggtcgctgcggccgcgtccaagacctctacggaggtgcaaacggacccgtggatgtttcgcgtttcagccccccggcgcccgcgccgttcgaggaagtacggcgccgccagcgcgctactgcccgaatatgccctacatccttccattgcgcctacccccggctatcgtggctacacctaccgccccagaagacgagcaactacccgacgccgaaccaccactggaacccgccgccgccgtcgccgtcgccagcccgtgctggccccgatttccgtgcgcagggtggctcgcgaaggaggcaggaccctggtgctgccaacagcgcgctaccaccccagcatcgtttaaaagccggtctttgtggttcttgcagatatggccctcacctgccgcctccgtttcccggtgccgggattccgaggaagaatgcaccgtaggaggggcatggccggccacggcctgacgggcggcatgcgtcgtgcgcaccaccggcggcggcgcgcgtcgcaccgtcgcatgcgcggcggtatcctgcccctccttattccactgatcgccgcggcgattggcgccgtgcccggaattgcatccgtggccttgcaggcgcagagacactgattaaaaacaagttgcatgtggaaaaatcaaaataaaaagtctggactctcacgctcgcttggtcctgtaactattttgtagaatggaagacatcaactttgcgtctctggccccgcgacacggctcgcgcccgttcatgggaaactggcaagatatcggcaccagcaatatgagcggtggcgccttcagctggggctcgctgtggagcggcattaaaaatttcggttccaccgttaagaactatggcagcaaggcctggaacagcagcacaggccagatgctgagggataagttgaaagagcaaaatttccaacaaaaggtggtagatggcctggcctctggcattagcggggtggtggacctggccaaccaggcagtgcaaaataagattaacagtaagcttgatccccgccctcccgtagaggagcctccaccggccgtggagacagtgtctccagaggggcgtggcgaaaagcgtccgcgccccgacagggaagaaactctggtgacgcaaatagacgagcctccctcgtacgaggaggcactaaagcaaggcctgcccaccacccgtcccatcgcgcccatggctaccggagtgctgggccagcacacacccgtaacgctggacctgcctccccccgccgacacccagcagaaacctgtgctgccaggcccgaccgccgttgttgtaacccgtcctagccgcgcgtccctgcgccgcgccgccagcggtccgcgatcgttgcggcccgtagccagtggcaactggcaaagcacactgaacagcatcgtgggtctgggggtgcaatccctgaagcgccgacgatgcttctgatagctaacgtgtcgtatgtgtgtcatgtatgcgtccatgtcgccgccagaggagctgctgagccgccgcgcgcccgctttccaagatggctaccccttcgatgatgccgcagtggtcttacatgcacatctcgggccaggacgcctcggagtacctgagccccgggctggtgcagtttgcccgcgccaccgagacgtacttcagcctgaataacaagtttagaaaccccacggtggcgcctacgcacgacgtgaccacagaccggtcccagcgtttgacgctgcggttcatccctgtggaccgtgaggatactgcgtactcgtacaaggcgcggttcaccctagctgtgggtgataaccgtgtgctggacatggcttccacgtactttgacatccgcggcgtgctggacaggggccctacttttaagccctactctggcactgcctacaacgccctggctcccaagggtgccccaaatccttgcgaatgggatgaagctgctactgctcttgaaataaacctagaagaagaggacgatgacaacgaagacgaagtagacgagcaagctgagcagcaaaaaactcacgtatttgggcaggcgccttattctggtataaatattacaaaggagggtattcaaataggtgtcgaaggtcaaacacctaaatatgccgataaaacatttcaacctgaacctcaaataggagaatctcagtggtacgaaacagaaattaatcatgcagctgggagagtcctaaaaaagactaccccaatgaaaccatgttacggttcatatgcaaaacccacaaatgaaaatggagggcaaggcattcttgtaaagcaacaaaatggaaagctagaaagtcaagtggaaatgcaatttttctcaactactgaggcagccgcaggcaatggtgataacttgactcctaaagtggtattgtacagtgaagatgtagatatagaaaccccagacactcatatttcttacatgcccactattaaggaaggtaactcacgagaactaatgggccaacaatctatgcccaacaggcctaattacattgcttttagggacaattttattggtctaatgtattacaacagcacgggtaatatgggtgttctggcgggccaagcatcgcagttgaatgctgttgtagatttgcaagacagaaacacagagctttcataccagcttttgcttgattccattggtgatagaaccaggtacttttctatgtggaatcaggctgttgacagctatgatccagatgttagaattattgaaaatcatggaactgaagatgaacttccaaattactgctttccactgggaggtgtgattaatacagagactcttaccaaggtaaaacctaaaacaggtcaggaaaatggatgggaaaaagatgctacagaattttcagataaaaatgaaataagagttggaaataattttgccatggaaatcaatctaaatgccaacctgtggagaaatttcctgtactccaacatagcgctgtatttgcccgacaagctaaagtacagtccttccaacgtaaaaatttctgataacccaaacacctacgactacatgaacaagcgagtggtggctcccgggctagtggactgctacattaaccttggagcacgctggtcccttgactatatggacaacgtcaacccatttaaccaccaccgcaatgctggcctgcgctaccgctcaatgttgctgggcaatggtcgctatgtgcccttccacatccaggtgcctcagaagttctttgccattaaaaacctccttctcctgccgggctcatacacctacgagtggaacttcaggaaggatgttaacatggttctgcagagctccctaggaaatgacctaagggttgacggagccagcattaagtttgatagcatttgcctttacgccaccttcttccccatggcccacaacaccgcctccacgcttgaggccatgcttagaaacgacaccaacgaccagtcctttaacgactatctctccgccgccaacatgctctaccctatacccgccaacgctaccaacgtgcccatatccatcccctcccgcaactgggcggctttccgcggctgggccttcacgcgccttaagactaaggaaaccccatcactgggctcgggctacgacccttattacacctactctggctctataccctacctagatggaaccttttacctcaaccacacctttaagaaggtggccattacctttgactcttctgtcagctggcctggcaatgaccgcctgcttacccccaacgagtttgaaattaagcgctcagttgacggggagggttacaacgttgcccagtgtaacatgaccaaagactggttcctggtacaaatgctagctaactataacattggctaccagggcttctatatcccagagagctacaaggaccgcatgtactccttctttagaaacttccagcccatgagccgtcaggtggtggatgatactaaatacaaggactaccaacaggtgggcatcctacaccaacacaacaactctggatttgttggctaccttgcccccaccatgcgcgaaggacaggcctaccctgctaacttcccctatccgcttataggcaagaccgcagttgacagcattacccagaaaaagtttctttgcgatcgcaccctttggcgcatcccattctccagtaactttatgtccatgggcgcactcacagacctgggccaaaaccttctctacgccaactccgcccacgcgctagacatgacttttgaggtggatcccatggacgagcccacccttctttatgttttgtttgaagtctttgacgtggtccgtgtgcaccagccgcaccgcggcgtcatcgaaaccgtgtacctgcgcacgcccttctcggccggcaacgccacaacataaagaagcaagcaacatcaacaacagctgccgccatgggctccagtgagcaggaactgaaagccattgtcaaagatcttggttgtgggccatattttttgggcacctatgacaagcgctttccaggctttgtttctccacacaagctcgcctgcgccatagtcaatacggccggtcgcgagactgggggcgtacactggatggcctttgcctggaacccgcactcaaaaacatgctacctctttgagccctttggcttttctgaccagcgactcaagcaggtttaccagtttgagtacgagtcactcctgcgccgtagcgccattgcttcttcccccgaccgctgtataacgctggaaaagtccacccaaagcgtacaggggcccaactcggccgcctgtggactattctgctgcatgtttctccacgcctttgccaactggccccaaactcccatggatcacaaccccaccatgaaccttattaccggggtacccaactccatgctcaacagtccccaggtacagcccaccctgcgtcgcaaccaggaacagctctacagcttcctggagcgccactcgccctacttccgcagccacagtgcgcagattaggagcgccacttctttttgtcacttgaaaaacatgtaaaaataatgtactagagacactttcaataaaggcaaatgcttttatttgtacactctcgggtgattatttacccccacccttgccgtctgcgccgtttaaaaatcaaaggggttctgccgcgcatcgctatgcgccactggcagggacacgttgcgatactggtgtttagtgctccacttaaactcaggcacaaccatccgcggcagctcggtgaagttttcactccacaggctgcgcaccatcaccaacgcgtttagcaggtcgggcgccgatatcttgaagtcgcagttggggcctccgccctgcgcgcgcgagttgcgatacacagggttgcagcactggaacactatcagcgccgggtggtgcacgctggccagcacgctcttgtcggagatcagatccgcgtccaggtcctccgcgttgctcagggcgaacggagtcaactttggtagctgccttcccaaaaagggcgcgtgcccaggctttgagttgcactcgcaccgtagtggcatcaaaaggtgaccgtgcccggtctgggcgttaggatacagcgcctgcataaaagccttgatctgcttaaaagccacctgagcctttgcgccttcagagaagaacatgccgcaagacttgccggaaaactgattggccggacaggccgcgtcgtgcacgcagcaccttgcgtcggtgttggagatctgcaccacatttcggccccaccggttcttcacgatcttggccttgctagactgctccttcagcgcgcgctgcccgttttcgctcgtcacatccatttcaatcacgtgctccttatttatcataatgcttccgtgtagacacttaagctcgccttcgatctcagcgcagcggtgcagccacaacgcgcagcccgtgggctcgtgatgcttgtaggtcacctctgcaaacgactgcaggtacgcctgcaggaatcgccccatcatcgtcacaaaggtcttgttgctggtgaaggtcagctgcaacccgcggtgctcctcgttcagccaggtcttgcatacggccgccagagcttccacttggtcaggcagtagtttgaagttcgcctttagatcgttatccacgtggtacttgtccatcagcgcgcgcgcagcctccatgcccttctcccacgcagacacgatcggcacactcagcgggttcatcaccgtaatttcactttccgcttcgctgggctcttcctcttcctcttgcgtccgcataccacgcgccactgggtcgtcttcattcagccgccgcactgtgcgcttacctcctttgccatgcttgattagcaccggtgggttgctgaaacccaccatttgtagcgccacatcttctctttcttcctcgctgtccacgattacctctggtgatggcgggcgctcgggcttgggagaagggcgcttctttttcttcttgggcgcaatggccaaatccgccgccgaggtcgatggccgcgggctgggtgtgcgcggcaccagcgcgtcttgtgatgagtcttcctcgtcctcggactcgatacgccgcctcatccgcttttttgggggcgcccggggaggcggcggcgacggggacggggacgacacgtcctccatggttgggggacgtcgcgccgcaccgcgtccgcgctcgggggtggtttcgcgctgctcctcttcccgactggccatttccttctcctataggcagaaaaagatcatggagtcagtcgagaagaaggacagcctaaccgccccctctgagttcgccaccaccgcctccaccgatgccgccaacgcgcctaccaccttccccgtcgaggcacccccgcttgaggaggaggaagtgattatcgagcaggacccaggttttgtaagcgaagacgacgaggaccgctcagtaccaacagaggataaaaagcaagaccaggacaacgcagaggcaaacgaggaacaagtcgggcggggggacgaaaggcatggcgactacctagatgtgggagacgacgtgctgttgaagcatctgcagcgccagtgcgccattatctgcgacgcgttgcaagagcgcagcgatgtgcccctcgccatagcggatgtcagccttgcctacgaacgccacctattctcaccgcgcgtaccccccaaacgccaagaaaacggcacatgcgagcccaacccgcgcctcaacttctaccccgtatttgccgtgccagaggtgcttgccacctatcacatctttttccaaaactgcaagatacccctatcctgccgtgccaaccgcagccgagcggacaagcagctggccttgcggcagggcgctgtcatacctgatatcgcctcgctcaacgaagtgccaaaaatctttgagggtcttggacgcgacgagaagcgcgcggcaaacgctctgcaacaggaaaacagcgaaaatgaaagtcactctggagtgttggtggaactcgagggtgacaacgcgcgcctagccgtactaaaacgcagcatcgaggtcacccactttgcctacccggcacttaacctaccccccaaggtcatgagcacagtcatgagtgagctgatcgtgcgccgtgcgcagcccctggagagggatgcaaatttgcaagaacaaacagaggagggcctacccgcagttggcgacgagcagctagcgcgctggcttcaaacgcgcgagcctgccgacttggaggagcgacgcaaactaatgatggccgcagtgctcgttaccgtggagcttgagtgcatgcagcggttctttgctgacccggagatgcagcgcaagctagaggaaacattgcactacacctttcgacagggctacgtacgccaggcctgcaagatctccaacgtggagctctgcaacctggtctcctaccttggaattttgcacgaaaaccgccttgggcaaaacgtgcttcattccacgctcaagggcgaggcgcgccgcgactacgtccgcgactgcgtttacttatttctatgctacacctggcagacggccatgggcgtttggcagcagtgcttggaggagtgcaacctcaaggagctgcagaaactgctaaagcaaaacttgaaggacctatggacggccttcaacgagcgctccgtggccgcgcacctggcggacatcattttccccgaacgcctgcttaaaaccctgcaacagggtctgccagacttcaccagtcaaagcatgttgcagaactttaggaactttatcctagagcgctcaggaatcttgcccgccacctgctgtgcacttcctagcgactttgtgcccattaagtaccgcgaatgccctccgccgctttggggccactgctaccttctgcagctagccaactaccttgcctaccactctgacataatggaagacgtgagcggtgacggtctactggagtgtcactgtcgctgcaacctatgcaccccgcaccgctccctggtttgcaattcgcagctgcttaacgaaagtcaaattatcggtacctttgagctgcagggtccctcgcctgacgaaaagtccgcggctccggggttgaaactcactccggggctgtggacgtcggcttaccttcgcaaatttgtacctgaggactaccacgcccacgagattaggttctacgaagaccaatcccgcccgcctaatgcggagcttaccgcctgcgtcattacccagggccacattcttggccaattgcaagccatcaacaaagcccgccaagagtttctgctacgaaagggacggggggtttacttggacccccagtccggcgaggagctcaacccaatccccccgccgccgcagccctatcagcagcagccgcgggcccttgcttcccaggatggcacccaaaaagaagctgcagctgccgccgccacccacggacgaggaggaatactgggacagtcaggcagaggaggttttggacgaggaggaggaggacatgatggaagactgggagagcctagacgaggaagcttccgaggtcgaagaggtgtcagacgaaacaccgtcaccctcggtcgcattcccctcgccggcgccccagaaatcggcaaccggttccagcatggctacaacctccgctcctcaggcgccgccggcactgcccgttcgccgacccaaccgtagatgggacaccactggaaccagggccggtaagtccaagcagccgccgccgttagcccaagagcaacaacagcgccaaggctaccgctcatggcgcgggcacaagaacgccatagttgcttgcttgcaagactgtgggggcaacatctccttcgcccgccgctttcttctctaccatcacggcgtggccttcccccgtaacatcctgcattactaccgtcatctctacagcccatactgcaccggcggcagcggcagcaacagcagcggccacacagaagcaaaggcgaccggatagcaagactctgacaaagcccaagaaatccacagcggcggcagcagcaggaggaggagcgctgcgtctggcgcccaacgaacccgtatcgacccgcgagcttagaaacaggatttttcccactctgtatgctatatttcaacagagcaggggccaagaacaagagctgaaaataaaaaacaggtctctgcgatccctcacccgcagctgcctgtatcacaaaagcgaagatcagcttcggcgcacgctggaagacgcggaggctctcttcagtaaatactgcgcgctgactcttaaggactagtttcgcgccctttctcaaatttaagcgcgaaaactacgtcatctccagcggccacacccggcgccagcacctgttgtcagcgccattatgagcaaggaaattcccacgccctacatgtggagttaccagccacaaatgggacttgcggctggagctgcccaagactactcaacccgaataaactacatgagcgcgggaccccacatgatatcccgggtcaacggaatacgcgcccaccgaaaccgaattctcctggaacaggcggctattaccaccacacctcgtaataaccttaatccccgtagttggcccgctgccctggtgtaccaggaaagtcccgctcccaccactgtggtacttcccagagacgcccaggccgaagttcagatgactaactcaggggcgcagcttgcgggcggctttcgtcacagggtgcggtcgcccgggcagggtataactcacctgacaatcagagggcgaggtattcagctcaacgacgagtcggtgagctcctcgcttggtctccgtccggacgggacatttcagatcggcggcgccggccgctcttcattcacgcctcgtcaggcaatcctaactctgcagacctcgtcctctgagccgcgctctggaggcattggaactctgcaatttattgaggagtttgtgccatcggtctactttaaccccttctcgggacctcccggccactatccggatcaatttattcctaactttgacgcggtaaaggactcggcggacggctacgactgaatgttaagtggagaggcagagcaactgcgcctgaaacacctggtccactgtcgccgccacaagtgctttgcccgcgactccggtgagttttgctactttgaattgcccgaggatcatatcgagggcccggcgcacggcgtccggcttaccgcccagggagagcttgcccgtagcctgattcgggagtttacccagcgccccctgctagttgagcgggacaggggaccctgtgttctcactgtgatttgcaactgtcctaaccctggattacatcaagatcctctagttaatgtcaggtcgcctaagtcgattaactagagtacccggggatcttattccctttaactaataaaaaaaaataataaagcatcacttacttaaaatcagttagcaaatttctgtccagtttattcagcagcacctccttgccctcctcccagctctggtattgcagcttcctcctggctgcaaactttctccacaatctaaatggaatgtcagtttcctcctgttcctgtccatccgcacccactatcttcatgttgttgcagatgaagcgcgcaagaccgtctgaagataccttcaaccccgtgtatccatatgacacggaaaccggtcctccaactgtgccttttcttactcctccctttgtatcccccaatgggtttcaagagagtccccctggggtactctctttgcgcctatccgaacctctagttacctccaatggcatgcttgcgctcaaaatgggcaacggcctctctctggacgaggccggcaaccttacctcccaaaatgtaaccactgtgagcccacctctcaaaaaaaccaagtcaaacataaacctggaaatatctgcacccctcacagttacctcagaagccctaactgtggctgccgccgcacctctaatggtcgcgggcaacacactcaccatgcaatcacaggccccgctaaccgtgcacgactccaaacttagcattgccacccaaggacccctcacagtgtcagaaggaaagctagccctgcaaacatcaggccccctcaccaccaccgatagcagtacccttactatcactgcctcaccccctctaactactgccactggtagcttgggcattgacttgaaagagcccatttatacacaaaatggaaaactaggactaaagtacggggctcctttgcatgtaacagacgacctaaacactttgaccgtagcaactggtccaggtgtgactattaataatacttccttgcaaactaaagttactggagccttgggttttgattcacaaggcaatatgcaacttaatgtagcaggaggactaaggattgattctcaaaacagacgccttatacttgatgttagttatccgtttgatgctcaaaaccaactaaatctaagactaggacagggccctctttttataaactcagcccacaacttggatattaactacaacaaaggcctttacttgtttacagcttcaaacaattccaaaaagcttgaggttaacctaagcactgccaaggggttgatgtttgacgctacagccatagccattaatgcaggagatgggcttgaatttggttcacctaatgcaccaaacacaaatcccctcaaaacaaaaattggccatggcctagaatttgattcaaacaaggctatggttcctaaactaggaactggccttagttttgacagcacaggtgccattacagtaggaaacaaaaataatgataagctaactttgtggaccggaataaaccctccacctaactgtcaaattgtggaaaacactaatacaaatgatggcaaacttactttagtattagtaaaaaatggagggcttgttaatggctacgtgtctctagttggtgtatcagacactgtgaaccaaatgttcacacaaaagacagcaaacatccaattaagattatattttgactcttctggaaatctattaactgaggaatcagacttaaaaattccacttaaaaataaatcttctacagcgaccagtgaaactgtagccagcagcaaagcctttatgccaagtactacagcttatcccttcaacaccactactagggatagtgaaaactacattcatggaatatgttactacatgactagttatgatagaagtctatttcccttgaacatttctataatgctaaacagccgtatgatttcttccaatgttgcctatgccatacaatttgaatggaatctaaatgcaagtgaatctccagaaagcaacatagctacgctgaccacatccccctttttcttttcttacattacagaagacgacaactaaagaatcgtttgtgttatgtttcaacgtgtttatttttcaattgcagaaaatttcaagtcatttttcattcagtagtatagccccaccaccacatagcttatacagatcaccgtaccttaatcaaactcacagaaccctagtattcaacctgccacctccctcccaacacacagagtacacagtcctttctccccggctggccttaaaaagcatcatatcatgggtaacagacatattcttaggtgttatattccacacggtttcctgtcgagccaaacgctcatcagtgatattaataaactccccgggcagctcacttaagttcatgtcgctgtccagctgctgagccacaggctgctgtccaacttgcggttgcttaacgggcggcgaaggagaagtccacgcgttgtgcattgtcaaagtgttacattcgggcagcagcggatgatcctccagtatggtagcgcgggtttctgtctcaaaaggaggtagacgatccctactgtacggagtgcgccgagacaaccgagatcgtgttggtcgtagtgtcatgccaaatggaacgccggacgtagtcatatttcctgaagcaaaaccaggtgcgggcgtgacaaacagatctgcgtctccggtctcgccgcttagatcgctctgtgtagtagttgtagtatatccactctctcaaagcatccaggcgccccctggcttcgggttctatgtaaactccttcatgcgccgctgccctgataacatccaccaccgcagaataagccacacccagccaacctacacattcgttctgcgagtcacacacgggaggagcgggaagagctggaagaaccatgtttttttttttattccaaaagattatccaaaacctcaaaatgaagatctattaagtgaacgcgctcccctccggtggcgtggtcaaactctacagccaaagaacagataatggcatttgtaagatgttgcacaatggcttccaaaaggcaaacggccctcacgtccaagtggacgtaaaggctaaacccttcagggtgaatctcctctataaacattccagcaccttcaaccatgcccaaataattctcatctcgccaccttctcaatatatctctaagcaaatcccgaatattaagtccggccattgtaaaaatctgctccagagcgccctccaccttcagcctcaagcagcgaatcatgattgcaaaaattcaggttcctcacagacctgtataagattcaaaagcggaacattaacaaaaataccgcgatcccgtaggtcccttcgcagggccagctgaacataatcgtgcaggtctgcacggaccagcgcggccacttccccgccaggaaccatgacaaaagaacccacactgattatgacacgcatactcggagctatgctaaccagcgtagccccgatgtaagcttgttgcatgggcggcgatataaaatgcaaggtgctgctcaaaaaatcaggcaaagcctcgcgcaaaaaagaaagcacatcgtagtcatgctcatgcagataaaggcaggtaagctccggaaccaccacagaaaaagacaccatttttctctcaaacatgtctgcgggtttctgcataaacacaaaataaaataacaaaaaaacatttaaacattagaagcctgtcttacaacaggaaaaacaacccttataagcataagacggactacggccatgccggcgtgaccgtaaaaaaactggtcaccgtgattaaaaagcaccaccgacagctcctcggtcatgtccggagtcataatgtaagactcggtaaacacatcaggttgattcacatcggtcagtgctaaaaagcgaccgaaatagcccgggggaatacatacccgcaggcgtagagacaacattacagcccccataggaggtataacaaaattaataggagagaaaaacacataaacacctgaaaaaccctcctgcctaggcaaaatagcaccctcccgctccagaacaacatacagcgcttccacagcggcagccataacagtcagccttaccagtaaaaaagaaaacctattaaaaaaacaccactcgacacggcaccagctcaatcagtcacagtgtaaaaaagggccaagtgcagagcgagtatatataggactaaaaaatgacgtaacggttaaagtccacaaaaaacacccagaaaaccgcacgcgaacctacgcccagaaacgaaagccaaaaaacccacaacttcctcaaatcgtcacttccgttttcccacgttacgtcacttcccattttaagaaaactacaattcccaacacatacaagttactccgccctaaaacctacgtcacccgccccgttcccacgccccgcgccacgtcacaaactccaccccctcattatcatattggcttcaatccaaaataaggtatattattgatgatg

SEQ ID NO: 33 - DNA, 35727 bp, Artificial Sequence
  Adk35RF-Spike/E4orf6(mPGK)-E4dl-711(E4re#31)
ttaattaacatcatcaataatataccttattttggattgaagccaatatgataatgagggggtggagtttgtgacgtggcgcggggcgtgggaacggggcgggtgacgtagtagtgtggcggaagtgtgatgttgcaagtgtggcggaacacatgtaagcgacggatgtggcaaaagtgacgtttttggtgtgcgccggtgtacacaggaagtgacaattttcgcgcggttttaggcggatgttgtagtaaatttgggcgtaaccgagtaagatttggccattttcgcgggaaaactgaataagaggaagtgaaatctgaataattttgtgttactcatagcgcgtaataatttgatccgcgttaagatacattgatgagtttggacaaaccacaactagaatgcagtgaaaaaaatgctttatttgtgaaatttgtgatgctattgctttatttgtaaccattataagctgcaataaacaagttaacaacaacaattgcattcattttatgtttcaggttcagggggaggtgtgggaggttttttaaagcaagtaaaacctctacaaatgtggtatggctgattatgatcaattttcatggccacttgatgtattgttcatatttgcccagttcttggaggtcaatcagggactcattcaggttcttagccacctcattcagtctgtcaatctccttctggatgttcaccacagaggcattgatgccagagatgtctcccaggtccacatcagggctggtgtggttcttgaagtatttgtccagttcctccttgaaggagtccagttcaggttggagtgggtcatagactgtgttgttcacaatgccaatcaccacatcacagttgccagacacaaaggtgttgtctgtggtgataatctgtggttcatagaagttcctctgggtcacaaaccagtgggtgccattgctcacaaacactccctcccttggaaagtgagccttgccatcatggcagatggcaggggctgtggtgaagttcttctcctgggcaggcacataggtcacatgcaggaacaccactccatgaggggcagactgtggaaaactcatcaggtggtagcccttgccacagaagtccaccctcttgctttgtcccagcacacactcactcatcttggtggcagccaggttggcagatgccctaatctcagcagccctgataagttgttgggtcacataggtttggagggattggagtctgcctgtaatcagtctgtcaatctggacctcagcctccaccttgtccagtctgctcaggatgtcattcagcacagaggagatggctccaaagttgctggaaagttgcttcaccagggtgttcagagcctgggcattctggttcaccacatcttggagtttgcccagggcagaggctgtgctggacagggagtcctgaatcttgccaatggcagagttgaactggttggcaatcagtttctggttctcatagagcacattctgggtcactccaatgccattgaacctgtaagccatctgcatagcaaatgggatttggagggctgctcctgctccaaaggtccagccagaggtgatggtgccagccagcagggcagaggtgtattgggcaatcatctcatctgtcagcagtggaggcagcactgtcagtccattgaacttctgggcacaaatcaggtccctggcagcaatgtctcccagacagtctccatattgcttgatgaagccagcatcagccagggtcaccttgttgaacagcaggtcctcaatgaaggacctcttgcttggcttgcttgggtcaggcagaatctggctgaagttgaagcctccaaagtccttgattggaggtgtcttgtaaatctgcttcacctgggcaaacacctcctgggtgttcttgtcctgttccacagcaatgcctgtcagagccctgttaagttgggtacagaaggagccatattggagcagcaggttgctacactctgtgctgtctccacagatatacattgtacagtccacagaggtcttggtcatactcacaggcagaatctctgtggtcacagagatggtgaagttggttgggatggcaatgctgttgttgctgtaagccacagagttctctgctcccagactcattgtgtaggcaatgatgctctggcttgccacagacctcgacccaccgccaccggtctgggtctggtaggaggcacagatgcctgctccaattgggatgtcacactcataggagttgttcacatgctctgctccaatcagacagccagccctggtctggaacacattgctgcctgtgctgtagaccctccaggttggtgtaagttggtcagcatggatagccacaggcacctcagtacagttcacatcctggtagagcacagccacctggttgctggtgttggtgccaggtgtaatcacagacactcctccaaaggaacatggtgtgatgtccagaatctccaaggtctgtgggtccctcacagcatctgtggtgtcagcaatgtccctgccaaactgttggaatggcaggaacttcttgttgctctctgtcagcactcctgtgcctgtcagtccattgaagttgaagttcacacacttgttcttcaccaggttggtgctcttctttggtccacacactgtggcaggggcatggagcagttcaaaggacagcaccaccaccctgtatggttggtagcccactccattggttggttggaagccataggattggagtggaaagtaacagttgaagccctccactccattacatggtgtgctgccagcctggtaaatctctgtgctgatgtccctctcaaatggtttcaggttgctcttcctgaacagtctgtagaggtagttgtagttgcctcccaccttgctgtccaggttgttgctgttccaggcaatcacacagcctgtgaagtcatcaggcagtttgtagttgtagtcagcaatcttgcctgtttgtccaggggcaatctgtctcacctcatctcccctaatcacaaaggagtcagcatagacattggtgaaacacaggtcattcagtttggttgggctcactccataacacttgaaggtgctgaaggaggcagagttgtagagcacagagtagtcagccacacagttgctaatcctcttcctgttccaggcatagacagaggcaaacctggtggcattgaacacctctccaaatggacacaggttggtgatgtttggaaacctcacaatgctctctgttggttggaccctgaagttgctggtctggtagatgcccttctccactgtgaaggatttcagggtacacttggtctcagacagtgggtccagggcacagtccacagcatctgtgatggtgccattctcattgtatttcagcaggaaggtccttggttggaggtagcccacatagtaggctgctgctcctgctgtccagccagaggaggagtctccaggtgtcaggtaggacctgtgcagagccagcagggtctggaacctggtgatgttgatgccaattggcaggtccaccagtggttccaaggcagagaagccctgtggcaggtccctcaccaggttgattggtgtgtgtttgctgtaaatcttgaagtagccatcaatgttcttgaacacaaactccctcaggttcttgaagttgccctgcttgccctccaagtccatcaggaatggttggctcacatattcaaaggtacagttgttggcagaggagtagaccctgaactcagactccatccaggacttgttgttcttgtggtagtagactcccaggaatgggtcattacagaactggaactcacacaccttaatcaccacattggtggcattgttcacaatcagcagggactgggtcttgctgtccagggtggtgccaaaaatccagcccctgatgatgttgctcttctctgtgctggcaaagtagactccatcattgaatggcagcacagggttgtcaaacctcttggtgccattggtgccagacacatggatggcatggaaccaggtcacattgctgaagaatggcaggaacaggtcctgggtgctgtgcagcacagaggacctgaacaccttgtcagggtagtagactcccctggtgaaggagttggtgtaggcaggaggaagttgggtcctggtggtcaggttcacacactggctggacaccagtggcagcagcaccaggaacacaaacatggtggcaaatcggaggctggatcggtcccggtgtcttctatggaggtcaaaacagcgtggatggcgtctccaggcgatctgacggttcactaaacgagctcgtcgacgatctctatcactgatagggagatctctatcactgatagggagagctctgcttatatagacctcccaccgtacacgcctaccgcccatttgcgtcaatggggcggagttgttacgacattttggaaagtcccgttgattttggtgccaaaacaaactcccattgacgtcaatggggtggagacttggaaatccccgtgagtcaaaccgctatccacgcccattgatgtactgccaaaaccgcatcaccatggtaatagcgatgactaatacgtagatgtactgccaagtaggaaagtcccataaggtcatgtactgggcataatgccaggcgggccatttaccgtcattgacgtcaatagggggcgtacttggcatatgatacacttgatgtactgccaagtgggcagtttaccgtaaatactccacccattgacgtcaatggaaagtccctattggcgttactatgggaacatacgtcattattgacgtcaatgggcgggggtcgttgggcggtcagccaggcgggccatttaccgtaagttatgtaacgcggaactccatatatgggctatgaactaatgaccccgtaattgattactattacaggggtaggggaggcgcttttcccaaggcagtctggagcatgcgctttagcagccccgctgggcacttggcgctacacaagtggcctctggcctcgcacacattccacatccaccggtaggcgccaaccggctccgttctttggtggccccttcgcgccaccttctactcctcccctagtcaggaagttcccccccgccccgcagctcgcgtcgtgcaggacgtgacaaatggaagtagcacgtctcactagtctcgtgcagatggacagcaccgctgagcaatggaagcgggtaggcctttggggcagcggccaatagcagctttgctccttcgctttctgggctcagaggctgggaaggggtgggtccgggggcgggctcaggggcgggctcaggggcggggcgggcgcccgaaggtcctccggaggcccggcattctgcacgcttcaaaagcgcacgtctgccgcgctgttctcctcttcctcatctccgggcctttcgaaactaccccaagctggccaccatgactacgtccggcgttccatttggcatgacactacgaccaacacgatctcggttgtctcggcgcactccgtacagtagggatcgtctacctccttttgagacagaaacccgcgctaccatactggaggatcatccgctgctgcccgaatgtaacactttgacaatgcacaacgtgagttacgtgcgaggtcttccctgcagtgtgggatttacgctgattcaggaatgggttgttccctgggatatggttctaacgcgggaggagcttgtaatcctgaggaagtgtatgcacgtgtgcctgtgttgtgccaacattgatatcatgacgagcatgatgatccatggttacgagtcctgggctctccactgtcattgttccagtcccggttccctgcagtgtatagccggcgggcaggttttggccagctggtttaggatggtggtggatggcgccatgtttaatcagaggtttatatggtaccgggaggtggtgaattacaacatgccaaaagaggtaatgtttatgtccagcgtgtttatgaggggtcgccacttaatctacctgcgcttgtggtatgatggccacgtgggttctgtggtccccgccatgagctttggatacagcgccttgcactgtgggattttgaacaatattgtggtgctgtgctgcagttactgtgctgatttaagtgagatcagggtgcgctgctgtgcccggaggacaaggcgccttatgctgcgggcggtgcgaatcatcgctgaggagaccactgccatgttgtattcctgcaggacggagcggcggcggcagcagtttattcgcgcgctgctgcagcaccaccgccctatcctgatgcacgattatgactctacccccatgtagaagcttggggatcaattctctagagctcgctgatcagcctcgactgtgccttctagttgccagccatctgttgtttgcccctcccccgtgccttccttgaccctggaaggtgccactcccactgtcctttcctaataaaatgaggaaattgcatcgcattgtctgagtaggtgtcattctattctggggggtggggtggggcaggacagcaagggggaggattgggaagacaatagcaggcatgctggggatgcggtgggctctatggcttctgaggcaaattgggcgtggcttaagggtgggaaagaatatataaggtgggggtcttatgtagttttgtatctgttttgcagcagccgccgccgccatgagcaccaactcgtttgatggaagcattgtgagctcatatttgacaacgcgcatgcccccatgggccggggtgcgtcagaatgtgatgggctccagcattgatggtcgccccgtcctgcccgcaaactctactaccttgacctacgagaccgtgtctggaacgccgttggagactgcagcctccgccgccgcttcagccgctgcagccaccgcccgcgggattgtgactgactttgctttcctgagcccgcttgcaagcagtgcagcttcccgttcatccgcccgcgatgacaagttgacggctcttttggcacaattggattctttgacccgggaacttaatgtcgtttctcagcagctgttggatctgcgccagcaggtttctgccctgaaggcttcctcccctcccaatgcggtttaaaacataaataaaaaaccagactctgtttggatttggatcaagcaagtgtcttgctgtctttatttaggggttttgcgcgcgcggtaggcccgggaccagcggtctcggtcgttgagggtcctgtgtattttttccaggacgtggtaaaggtgactctggatgttcagatacatgggcataagcccgtctctggggtggaggtagcaccactgcagagcttcatgctgcggggtggtgttgtagatgatccagtcgtagcaggagcgctgggcgtggtgcctaaaaatgtctttcagtagcaagctgattgccaggggcaggcccttggtgtaagtgtttacaaagcggttaagctgggatgggtgcatacgtggggatatgagatgcatcttggactgtatttttaggttggctatgttcccagccatatccctccggggattcatgttgtgcagaaccaccagcacagtgtatccggtgcacttgggaaatttgtcatgtagcttagaaggaaatgcgtggaagaacttggagacgcccttgtgacctccaagattttccatgcattcgtccataatgatggcaatgggcccacgggcggcggcctgggcgaagatatttctgggatcactaacgtcatagttgtgttccaggatgagatcgtcataggccatttttacaaagcgcgggcggagggtgccagactgcggtataatggttccatccggcccaggggcgtagttaccctcacagatttgcatttcccacgctttgagttcagatggggggatcatgtctacctgcggggcgatgaagaaaacggtttccggggtaggggagatcagctgggaagaaagcaggttcctgagcagctgcgacttaccgcagccggtgggcccgtaaatcacacctattaccgggtgcaactggtagttaagagagctgcagctgccgtcatccctgagcaggggggccacttcgttaagcatgtccctgactcgcatgttttccctgaccaaatccgccagaaggcgctcgccgcccagcgatagcagttcttgcaaggaagcaaagtttttcaacggtttgagaccgtccgccgtaggcatgcttttgagcgtttgaccaagcagttccaggcggtcccacagctcggtcacctgctctacggcatctcgatccagcatatctcctcgtttcgcgggttggggcggctttcgctgtacggcagtagtcggtgctcgtccagacgggccagggtcatgtctttccacgggcgcagggtcctcgtcagcgtagtctgggtcacggtgaaggggtgcgctccgggctgcgcgctggccagggtgcgcttgaggctggtcctgctggtgctgaagcgctgccggtcttcgccctgcgcgtcggccaggtagcatttgaccatggtgtcatagtccagcccctccgcggcgtggcccttggcgcgcagcttgcccttggaggaggcgccgcacgaggggcagtgcagacttttgagggcgtagagcttgggcgcgagaaataccgattccggggagtaggcatccgcgccgcaggccccgcagacggtctcgcattccacgagccaggtgagctctggccgttcggggtcaaaaaccaggtttcccccatgctttttgatgcgtttcttacctctggtttccatgagccggtgtccacgctcggtgacgaaaaggctgtccgtgtccccgtatacagacttgagaggcctgtcctcgagcggtgttccgcggtcctcctcgtatagaaactcggaccactctgagacaaaggctcgcgtccaggccagcacgaaggaggctaagtgggaggggtagcggtcgttgtccactagggggtccactcgctccagggtgtgaagacacatgtcgccctcttcggcatcaaggaaggtgattggtttgtaggtgtaggccacgtgaccgggtgttcctgaaggggggctataaaagggggtgggggcgcgttcgtcctcactctcttccgcatcgctgtctgcgagggccagctgttggggtgagtactccctctgaaaagcgggcatgacttctgcgctaagattgtcagtttccaaaaacgaggaggatttgatattcacctggcccgcggtgatgcctttgagggtggccgcatccatctggtcagaaaagacaatctttttgttgtcaagcttggtggcaaacgacccgtagagggcgttggacagcaacttggcgatggagcgcagggtttggtttttgtcgcgatcggcgcgctccttggccgcgatgtttagctgcacgtattcgcgcgcaacgcaccgccattcgggaaagacggtggtgcgctcgtcgggcaccaggtgcacgcgccaaccgcggttgtgcagggtgacaaggtcaacgctggtggctacctctccgcgtaggcgctcgttggtccagcagaggcggccgcccttgcgcgagcagaatggcggtagggggtctagctgcgtctcgtccggggggtctgcgtccacggtaaagaccccgggcagcaggcgcgcgtcgaagtagtctatcttgcatccttgcaagtctagcgcctgctgccatgcgcgggcggcaagcgcgcgctcgtatgggttgagtgggggaccccatggcatggggtgggtgagcgcggaggcgtacatgccgcaaatgtcgtaaacgtagaggggctctctgagtattccaagatatgtagggtagcatcttccaccgcggatgctggcgcgcacgtaatcgtatagttcgtgcgagggagcgaggaggtcgggaccgaggttgctacgggcgggctgctctgctcggaagactatctgcctgaagatggcatgtgagttggatgatatggttggacgctggaagacgttgaagctggcgtctgtgagacctaccgcgtcacgcacgaaggaggcgtaggagtcgcgcagcttgttgaccagctcggcggtgacctgcacgtctagggcgcagtagtccagggtttccttgatgatgtcatacttatcctgtcccttttttttccacagctcgcggttgaggacaaactcttcgcggtctttccagtactcttggatcggaaacccgtcggcctccgaacggtaagagcctagcatgtagaactggttgacggcctggtaggcgcagcatcccttttctacgggtagcgcgtatgcctgcgcggccttccggagcgaggtgtgggtgagcgcaaaggtgtccctgaccatgactttgaggtactggtatttgaagtcagtgtcgtcgcatccgccctgctcccagagcaaaaagtccgtgcgctttttggaacgcggatttggcagggcgaaggtgacatcgttgaagagtatctttcccgcgcgaggcataaagttgcgtgtgatgcggaagggtcccggcacctcggaacggttgttaattacctgggcggcgagcacgatctcgtcaaagccgttgatgttgtggcccacaatgtaaagttccaagaagcgcgggatgcccttgatggaaggcaattttttaagttcctcgtaggtgagctcttcaggggagctgagcccgtgctctgaaagggcccagtctgcaagatgagggttggaagcgacgaatgagctccacaggtcacgggccattagcatttgcaggtggtcgcgaaaggtcctaaactggcgacctatggccattttttctggggtgatgcagtagaaggtaagcgggtcttgttcccagcggtcccatccaaggttcgcggctaggtctcgcgcggcagtcactagaggctcatctccgccgaacttcatgaccagcatgaagggcacgagctgcttcccaaaggcccccatccaagtataggtctctacatcgtaggtgacaaagagacgctcggtgcgaggatgcgagccgatcgggaagaactggatctcccgccaccaattggaggagtggctattgatgtggtgaaagtagaagtccctgcgacgggccgaacactcgtgctggcttttgtaaaaacgtgcgcagtactggcagcggtgcacgggctgtacatcctgcacgaggttgacctgacgaccgcgcacaaggaagcagagtgggaatttgagcccctcgcctggcgggtttggctggtggtcttctacttcggctgcttgtccttgaccgtctggctgctcgaggggagttacggtggatcggaccaccacgccgcgcgagcccaaagtccagatgtccgcgcgcggcggtcggagcttgatgacaacatcgcgcagatgggagctgtccatggtctggagctcccgcggcgtcaggtcaggcgggagctcctgcaggtttacctcgcatagacgggtcagggcgcgggctagatccaggtgatacctaatttccaggggctggttggtggcggcgtcgatggcttgcaagaggccgcatccccgcggcgcgactacggtaccgcgcggcgggcggtgggccgcgggggtgtccttggatgatgcatctaaaagcggtgacgcgggcgagcccccggaggtagggggggctccggacccgccgggagagggggcaggggcacgtcggcgccgcgcgcgggcaggagctggtgctgcgcgcgtaggttgctggcgaacgcgacgacgcggcggttgatctcctgaatctggcgcctctgcgtgaagacgacgggcccggtgagcttgaacctgaaagagagttcgacagaatcaatttcggtgtcgttgacggcggcctggcgcaaaatctcctgcacgtctcctgagttgtcttgataggcgatctcggccatgaactgctcgatctcttcctcctggagatctccgcgtccggctcgctccacggtggcggcgaggtcgttggaaatgcgggccatgagctgcgagaaggcgttgaggcctccctcgttccagacgcggctgtagaccacgcccccttcggcatcgcgggcgcgcatgaccacctgcgcgagattgagctccacgtgccgggcgaagacggcgtagtttcgcaggcgctgaaagaggtagttgagggtggtggcggtgtgttctgccacgaagaagtacataacccagcgtcgcaacgtggattcgttgatatcccccaaggcctcaaggcgctccatggcctcgtagaagtccacggcgaagttgaaaaactgggagttgcgcgccgacacggttaactcctcctccagaagacggatgagctcggcgacagtgtcgcgcacctcgcgctcaaaggctacaggggcctcttcttcttcttcaatctcctcttccataagggcctccccttcttcttcttctggcggcggtgggggaggggggacacggcggcgacgacggcgcaccgggaggcggtcgacaaagcgctcgatcatctccccgcggcgacggcgcatggtctcggtgacggcgcggccgttctcgcgggggcgcagttggaagacgccgcccgtcatgtcccggttatgggttggcggggggctgccatgcggcagggatacggcgctaacgatgcatctcaacaattgttgtgtaggtactccgccgccgagggacctgagcgagtccgcatcgaccggatcggaaaacctctcgagaaaggcgtctaaccagtcacagtcgcaaggtaggctgagcaccgtggcgggcggcagcgggcggcggtcggggttgtttctggcggaggtgctgctgatgatgtaattaaagtaggcggtcttgagacggcggatggtcgacagaagcaccatgtccttgggtccggcctgctgaatgcgcaggcggtcggccatgccccaggcttcgttttgacatcggcgcaggtctttgtagtagtcttgcatgagcctttctaccggcacttcttcttctccttcctcttgtcctgcatctcttgcatctatcgctgcggcggcggcggagtttggccgtaggtggcgccctcttcctcccatgcgtgtgaccccgaagcccctcatcggctgaagcagggctaggtcggcgacaacgcgctcggctaatatggcctgctgcacctgcgtgagggtagactggaagtcatccatgtccacaaagcggtggtatgcgcccgtgttgatggtgtaagtgcagttggccataacggaccagttaacggtctggtgacccggctgcgagagctcggtgtacctgagacgcgagtaagccctcgagtcaaatacgtagtcgttgcaagtccgcaccaggtactggtatcccaccaaaaagtgcggcggcggctggcggtagaggggccagcgtagggtggccggggctccgggggcgagatcttccaacataaggcgatgatatccgtagatgtacctggacatccaggtgatgccggcggcggtggtggaggcgcgcggaaagtcgcggacgcggttccagatgttgcgcagcggcaaaaagtgctccatggtcgggacgctctggccggtcaggcgcgcgcaatcgttgacgctctagcgtgcaaaaggagagcctgtaagcgggcactcttccgtggtctggtggataaattcgcaagggtatcatggcggacgaccggggttcgagccccgtatccggccgtccgccgtgatccatgcggttaccgcccgcgtgtcgaacccaggtgtgcgacgtcagacaacgggggagtgctccttttggcttccttccaggcgcggcggctgctgcgctagcttttttggccactggccgcgcgcagcgtaagcggttaggctggaaagcgaaagcattaagtggctcgctccctgtagccggagggttattttccaagggttgagtcgcgggacccccggttcgagtctcggaccggccggactgcggcgaacgggggtttgcctccccgtcatgcaagaccccgcttgcaaattcctccggaaacagggacgagccccttttttgcttttcccagatgcatccggtgctgcggcagatgcgcccccctcctcagcagcggcaagagcaagagcagcggcagacatgcagggcaccctcccctcctcctaccgcgtcaggaggggcgacatccgcggttgacgcggcagcagatggtgattacgaacccccgcggcgccgggcccggcactacctggacttggaggagggcgagggcctggcgcggctaggagcgccctctcctgagcggcacccaagggtgcagctgaagcgtgatacgcgtgaggcgtacgtgccgcggcagaacctgtttcgcgaccgcgagggagaggagcccgaggagatgcgggatcgaaagttccacgcagggcgcgagctgcggcatggcctgaatcgcgagcggttgctgcgcgaggaggactttgagcccgacgcgcgaaccgggattagtcccgcgcgcgcacacgtggcggccgccgacctggtaaccgcatacgagcagacggtgaaccaggagattaactttcaaaaaagctttaacaaccacgtgcgtacgcttgtggcgcgcgaggaggtggctataggactgatgcatctgtgggactttgtaagcgcgctggagcaaaacccaaatagcaagccgctcatggcgcagctgttccttatagtgcagcacagcagggacaacgaggcattcagggatgcgctgctaaacatagtagagcccgagggccgctggctgctcgatttgataaacatcctgcagagcatagtggtgcaggagcgcagcttgagcctggctgacaaggtggccgccatcaactattccatgcttagcctgggcaagttttacgcccgcaagatataccataccccttacgttcccatagacaaggaggtaaagatcgaggggttctacatgcgcatggcgctgaaggtgcttaccttgagcgacgacctgggcgtttatcgcaacgagcgcatccacaaggccgtgagcgtgagccggcggcgcgagctcagcgaccgcgagctgatgcacagcctgcaaagggccctggctggcacgggcagcggcgatagagaggccgagtcctactttgacgcgggcgctgacctgcgctgggccccaagccgacgcgccctggaggcagctggggccggacctgggctggcggtggcacccgcgcgcgctggcaacgtcggcggcgtggaggaatatgacgaggacgatgagtacgagccagaggacggcgagtactaagcggtgatgtttctgatcagatgatgcaagacgcaacggacccggcggtgcgggcggcgctgcagagccagccgtccggccttaactccacggacgactggcgccaggtcatggaccgcatcatgtcgctgactgcgcgcaatcctgacgcgttccggcagcagccgcaggccaaccggctctccgcaattctggaagcggtggtcccggcgcgcgcaaaccccacgcacgagaaggtgctggcgatcgtaaacgcgctggccgaaaacagggccatccggcccgacgaggccggcctggtctacgacgcgctgcttcagcgcgtggctcgttacaacagcggcaacgtgcagaccaacctggaccggctggtgggggatgtgcgcgaggccgtggcgcagcgtgagcgcgcgcagcagcagggcaacctgggctccatggttgcactaaacgccttcctgagtacacagcccgccaacgtgccgcggggacaggaggactacaccaactttgtgagcgcactgcggctaatggtgactgagacaccgcaaagtgaggtgtaccagtctgggccagactattttttccagaccagtagacaaggcctgcagaccgtaaacctgagccaggctttcaaaaacttgcaggggctgtggggggtgcgggctcccacaggcgaccgcgcgaccgtgtctagcttgctgacgcccaactcgcgcctgttgctgctgctaatagcgcccttcacggacagtggcagcgtgtcccgggacacatacctaggtcacttgctgacactgtaccgcgaggccataggtcaggcgcatgtggacgagcatactttccaggagattacaagtgtcagccgcgcgctggggcaggaggacacgggcagcctggaggcaaccctaaactacctgctgaccaaccggcggcagaagatcccctcgttgcacagtttaaacagcgaggaggagcgcattttgcgctacgtgcagcagagcgtgagccttaacctgatgcgcgacggggtaacgcccagcgtggcgctggacatgaccgcgcgcaacatggaaccgggcatgtatgcctcaaaccggccgtttatcaaccgcctaatggactacttgcatcgcgcggccgccgtgaaccccgagtatttcaccaatgccatcttgaacccgcactggctaccgccccctggtttctacaccgggggattcgaggtgcccgagggtaacgatggattcctctgggacgacatagacgacagcgtgttttccccgcaaccgcagaccctgctagagttgcaacagcgcgagcaggcagaggcggcgctgcgaaaggaaagcttccgcaggccaagcagcttgtccgatctaggcgctgcggccccgcggtcagatgctagtagcccatttccaagcttgatagggtctcttaccagcactcgcaccacccgcccgcgcctgctgggcgaggaggagtacctaaacaactcgctgctgcagccgcagcgcgaaaaaaacctgcctccggcatttcccaacaacgggatagagagcctagtggacaagatgagtagatggaagacgtacgcgcaggagcacagggacgtgccaggcccgcgcccgcccacccgtcgtcaaaggcacgaccgtcagcggggtctggtgtgggaggacgatgactcggcagacgacagcagcgtcctggatttgggagggagtggcaacccgtttgcgcaccttcgccccaggctggggagaatgttttaaaaaaaaaaaagcatgatgcaaaataaaaaactcaccaaggccatggcaccgagcgttggttttcttgtattccccttagtatgcggcgcgcggcgatgtatgaggaaggtcctcctccctcctacgagagtgtggtgagcgcggcgccagtggcggcggcgctgggttctcccttcgatgctcccctggacccgccgtttgtgcctccgcggtacctgcggcctaccggggggagaaacagcatccgttactctgagttggcacccctattcgacaccacccgtgtgtacctggtggacaacaagtcaacggatgtggcatccctgaactaccagaacgaccacagcaactttctgaccacggtcattcaaaacaatgactacagcccgggggaggcaagcacacagaccatcaatcttgacgaccggtcgcactggggcggcgacctgaaaaccatcctgcataccaacatgccaaatgtgaacgagttcatgtttaccaataagtttaaggcgcgggtgatggtgtcgcgcttgcctactaaggacaatcaggtggagctgaaatacgagtgggtggagttcacgctgcccgagggcaactactccgagaccatgaccatagaccttatgaacaacgcgatcgtggagcactacttgaaagtgggcagacagaacggggttctggaaagcgacatcggggtaaagtttgacacccgcaacttcagactggggtttgaccccgtcactggtcttgtcatgcctggggtatatacaaacgaagccttccatccagacatcattttgctgccaggatgcggggtggacttcacccacagccgcctgagcaacttgttgggcatccgcaagcggcaacccttccaggagggctttaggatcacctacgatgatctggagggtggtaacattcccgcactgttggatgtggacgcctaccaggcgagcttgaaagatgacaccgaacagggcgggggtggcgcaggcggcagcaacagcagtggcagcggcgcggaagagaactccaacgcggcagccgcggcaatgcagccggtggaggacatgaacgatcatgccattcgcggcgacacctttgccacacgggctgaggagaagcgcgctgaggccgaagcagcggccgaagctgccgcccccgctgcgcaacccgaggtcgagaagcctcagaagaaaccggtgatcaaacccctgacagaggacagcaagaaacgcagttacaacctaataagcaatgacagcaccttcacccagtaccgcagctggtaccttgcatacaactacggcgaccctcagaccggaatccgctcatggaccctgctttgcactcctgacgtaacctgcggctcggagcaggtctactggtcgttgccagacatgatgcaagaccccgtgaccttccgctccacgcgccagatcagcaactttccggtggtgggcgccgagctgttgcccgtgcactccaagagcttctacaacgaccaggccgtctactcccaactcatccgccagtttacctctctgacccacgtgttcaatcgctttcccgagaaccagattttggcgcgcccgccagcccccaccatcaccaccgtcagtgaaaacgttcctgctctcacagatcacgggacgctaccgctgcgcaacagcatcggaggagtccagcgagtgaccattactgacgccagacgccgcacctgcccctacgtttacaaggccctgggcatagtctcgccgcgcgtcctatcgagccgcactttttgagcaagcatgtccatccttatatcgcccagcaataacacaggctggggcctgcgcttcccaagcaagatgtttggcggggccaagaagcgctccgaccaacacccagtgcgcgtgcgcgggcactaccgcgcgccctggggcgcgcacaaacgcggccgcactgggcgcaccaccgtcgatgacgccatcgacgcggtggtggaggaggcgcgcaactacacgcccacgccgccaccagtgtccacagtggacgcggccattcagaccgtggtgcgcggagcccggcgctatgctaaaatgaagagacggcggaggcgcgtagcacgtcgccaccgccgccgacccggcactgccgcccaacgcgcggcggcggccctgcttaaccgcgcacgtcgcaccggccgacgggcggccatgcgggccgctcgaaggctggccgcgggtattgtcactgtgccccccaggtccaggcgacgagcggccgccgcagcagccgcggccattagtgctatgactcagggtcgcaggggcaacgtgtattgggtgcgcgactcggttagcggcctgcgcgtgcccgtgcgcacccgccccccgcgcaactagattgcaagaaaaaactacttagactcgtactgttgtatgtatccagcggcggcggcgcgcaacgaagctatgtccaagcgcaaaatcaaagaagagatgctccaggtcatcgcgccggagatctatggccccccgaagaaggaagagcaggattacaagccccgaaagctaaagcgggtcaaaaagaaaaagaaagatgatgatgatgaacttgacgacgaggtggaactgctgcacgctaccgcgcccaggcgacgggtacagtggaaaggtcgacgcgtaaaacgtgttttgcgacccggcaccaccgtagtctttacgcccggtgagcgctccacccgcacctacaagcgcgtgtatgatgaggtgtacggcgacgaggacctgcttgagcaggccaacgagcgcctcggggagtttgcctacggaaagcggcataaggacatgctggcgttgccgctggacgagggcaacccaacacctagcctaaagcccgtaacactgcagcaggtgctgcccgcgcttgcaccgtccgaagaaaagcgcggcctaaagcgcgagtctggtgacttggcacccaccgtgcagctgatggtacccaagcgccagcgactggaagatgtcttggaaaaaatgaccgtggaacctgggctggagcccgaggtccgcgtgcggccaatcaagcaggtggcgccgggactgggcgtgcagaccgtggacgttcagatacccactaccagtagcaccagtattgccaccgccacagagggcatggagacacaaacgtccccggttgcctcagcggtggcggatgccgcggtgcaggcggtcgctgcggccgcgtccaagacctctacggaggtgcaaacggacccgtggatgtttcgcgtttcagccccccggcgcccgcgccgttcgaggaagtacggcgccgccagcgcgctactgcccgaatatgccctacatccttccattgcgcctacccccggctatcgtggctacacctaccgccccagaagacgagcaactacccgacgccgaaccaccactggaacccgccgccgccgtcgccgtcgccagcccgtgctggccccgatttccgtgcgcagggtggctcgcgaaggaggcaggaccctggtgctgccaacagcgcgctaccaccccagcatcgtttaaaagccggtctttgtggttcttgcagatatggccctcacctgccgcctccgtttcccggtgccgggattccgaggaagaatgcaccgtaggaggggcatggccggccacggcctgacgggcggcatgcgtcgtgcgcaccaccggcggcggcgcgcgtcgcaccgtcgcatgcgcggcggtatcctgcccctccttattccactgatcgccgcggcgattggcgccgtgcccggaattgcatccgtggccttgcaggcgcagagacactgattaaaaacaagttgcatgtggaaaaatcaaaataaaaagtctggactctcacgctcgcttggtcctgtaactattttgtagaatggaagacatcaactttgcgtctctggccccgcgacacggctcgcgcccgttcatgggaaactggcaagatatcggcaccagcaatatgagcggtggcgccttcagctggggctcgctgtggagcggcattaaaaatttcggttccaccgttaagaactatggcagcaaggcctggaacagcagcacaggccagatgctgagggataagttgaaagagcaaaatttccaacaaaaggtggtagatggcctggcctctggcattagcggggtggtggacctggccaaccaggcagtgcaaaataagattaacagtaagcttgatccccgccctcccgtagaggagcctccaccggccgtggagacagtgtctccagaggggcgtggcgaaaagcgtccgcgccccgacagggaagaaactctggtgacgcaaatagacgagcctccctcgtacgaggaggcactaaagcaaggcctgcccaccacccgtcccatcgcgcccatggctaccggagtgctgggccagcacacacccgtaacgctggacctgcctccccccgccgacacccagcagaaacctgtgctgccaggcccgaccgccgttgttgtaacccgtcctagccgcgcgtccctgcgccgcgccgccagcggtccgcgatcgttgcggcccgtagccagtggcaactggcaaagcacactgaacagcatcgtgggtctgggggtgcaatccctgaagcgccgacgatgcttctgatagctaacgtgtcgtatgtgtgtcatgtatgcgtccatgtcgccgccagaggagctgctgagccgccgcgcgcccgctttccaagatggctaccccttcgatgatgccgcagtggtcttacatgcacatctcgggccaggacgcctcggagtacctgagccccgggctggtgcagtttgcccgcgccaccgagacgtacttcagcctgaataacaagtttagaaaccccacggtggcgcctacgcacgacgtgaccacagaccggtcccagcgtttgacgctgcggttcatccctgtggaccgtgaggatactgcgtactcgtacaaggcgcggttcaccctagctgtgggtgataaccgtgtgctggacatggcttccacgtactttgacatccgcggcgtgctggacaggggccctacttttaagccctactctggcactgcctacaacgccctggctcccaagggtgccccaaatccttgcgaatgggatgaagctgctactgctcttgaaataaacctagaagaagaggacgatgacaacgaagacgaagtagacgagcaagctgagcagcaaaaaactcacgtatttgggcaggcgccttattctggtataaatattacaaaggagggtattcaaataggtgtcgaaggtcaaacacctaaatatgccgataaaacatttcaacctgaacctcaaataggagaatctcagtggtacgaaacagaaattaatcatgcagctgggagagtcctaaaaaagactaccccaatgaaaccatgttacggttcatatgcaaaacccacaaatgaaaatggagggcaaggcattcttgtaaagcaacaaaatggaaagctagaaagtcaagtggaaatgcaatttttctcaactactgaggcagccgcaggcaatggtgataacttgactcctaaagtggtattgtacagtgaagatgtagatatagaaaccccagacactcatatttcttacatgcccactattaaggaaggtaactcacgagaactaatgggccaacaatctatgcccaacaggcctaattacattgcttttagggacaattttattggtctaatgtattacaacagcacgggtaatatgggtgttctggcgggccaagcatcgcagttgaatgctgttgtagatttgcaagacagaaacacagagctttcataccagcttttgcttgattccattggtgatagaaccaggtacttttctatgtggaatcaggctgttgacagctatgatccagatgttagaattattgaaaatcatggaactgaagatgaacttccaaattactgctttccactgggaggtgtgattaatacagagactcttaccaaggtaaaacctaaaacaggtcaggaaaatggatgggaaaaagatgctacagaattttcagataaaaatgaaataagagttggaaataattttgccatggaaatcaatctaaatgccaacctgtggagaaatttcctgtactccaacatagcgctgtatttgcccgacaagctaaagtacagtccttccaacgtaaaaatttctgataacccaaacacctacgactacatgaacaagcgagtggtggctcccgggctagtggactgctacattaaccttggagcacgctggtcccttgactatatggacaacgtcaacccatttaaccaccaccgcaatgctggcctgcgctaccgctcaatgttgctgggcaatggtcgctatgtgcccttccacatccaggtgcctcagaagttctttgccattaaaaacctccttctcctgccgggctcatacacctacgagtggaacttcaggaaggatgttaacatggttctgcagagctccctaggaaatgacctaagggttgacggagccagcattaagtttgatagcatttgcctttacgccaccttcttccccatggcccacaacaccgcctccacgcttgaggccatgcttagaaacgacaccaacgaccagtcctttaacgactatctctccgccgccaacatgctctaccctatacccgccaacgctaccaacgtgcccatatccatcccctcccgcaactgggcggctttccgcggctgggccttcacgcgccttaagactaaggaaaccccatcactgggctcgggctacgacccttattacacctactctggctctataccctacctagatggaaccttttacctcaaccacacctttaagaaggtggccattacctttgactcttctgtcagctggcctggcaatgaccgcctgcttacccccaacgagtttgaaattaagcgctcagttgacggggagggttacaacgttgcccagtgtaacatgaccaaagactggttcctggtacaaatgctagctaactataacattggctaccagggcttctatatcccagagagctacaaggaccgcatgtactccttctttagaaacttccagcccatgagccgtcaggtggtggatgatactaaatacaaggactaccaacaggtgggcatcctacaccaacacaacaactctggatttgttggctaccttgcccccaccatgcgcgaaggacaggcctaccctgctaacttcccctatccgcttataggcaagaccgcagttgacagcattacccagaaaaagtttctttgcgatcgcaccctttggcgcatcccattctccagtaactttatgtccatgggcgcactcacagacctgggccaaaaccttctctacgccaactccgcccacgcgctagacatgacttttgaggtggatcccatggacgagcccacccttctttatgttttgtttgaagtctttgacgtggtccgtgtgcaccagccgcaccgcggcgtcatcgaaaccgtgtacctgcgcacgcccttctcggccggcaacgccacaacataaagaagcaagcaacatcaacaacagctgccgccatgggctccagtgagcaggaactgaaagccattgtcaaagatcttggttgtgggccatattttttgggcacctatgacaagcgctttccaggctttgtttctccacacaagctcgcctgcgccatagtcaatacggccggtcgcgagactgggggcgtacactggatggcctttgcctggaacccgcactcaaaaacatgctacctctttgagccctttggcttttctgaccagcgactcaagcaggtttaccagtttgagtacgagtcactcctgcgccgtagcgccattgcttcttcccccgaccgctgtataacgctggaaaagtccacccaaagcgtacaggggcccaactcggccgcctgtggactattctgctgcatgtttctccacgcctttgccaactggccccaaactcccatggatcacaaccccaccatgaaccttattaccggggtacccaactccatgctcaacagtccccaggtacagcccaccctgcgtcgcaaccaggaacagctctacagcttcctggagcgccactcgccctacttccgcagccacagtgcgcagattaggagcgccacttctttttgtcacttgaaaaacatgtaaaaataatgtactagagacactttcaataaaggcaaatgcttttatttgtacactctcgggtgattatttacccccacccttgccgtctgcgccgtttaaaaatcaaaggggttctgccgcgcatcgctatgcgccactggcagggacacgttgcgatactggtgtttagtgctccacttaaactcaggcacaaccatccgcggcagctcggtgaagttttcactccacaggctgcgcaccatcaccaacgcgtttagcaggtcgggcgccgatatcttgaagtcgcagttggggcctccgccctgcgcgcgcgagttgcgatacacagggttgcagcactggaacactatcagcgccgggtggtgcacgctggccagcacgctcttgtcggagatcagatccgcgtccaggtcctccgcgttgctcagggcgaacggagtcaactttggtagctgccttcccaaaaagggcgcgtgcccaggctttgagttgcactcgcaccgtagtggcatcaaaaggtgaccgtgcccggtctgggcgttaggatacagcgcctgcataaaagccttgatctgcttaaaagccacctgagcctttgcgccttcagagaagaacatgccgcaagacttgccggaaaactgattggccggacaggccgcgtcgtgcacgcagcaccttgcgtcggtgttggagatctgcaccacatttcggccccaccggttcttcacgatcttggccttgctagactgctccttcagcgcgcgctgcccgttttcgctcgtcacatccatttcaatcacgtgctccttatttatcataatgcttccgtgtagacacttaagctcgccttcgatctcagcgcagcggtgcagccacaacgcgcagcccgtgggctcgtgatgcttgtaggtcacctctgcaaacgactgcaggtacgcctgcaggaatcgccccatcatcgtcacaaaggtcttgttgctggtgaaggtcagctgcaacccgcggtgctcctcgttcagccaggtcttgcatacggccgccagagcttccacttggtcaggcagtagtttgaagttcgcctttagatcgttatccacgtggtacttgtccatcagcgcgcgcgcagcctccatgcccttctcccacgcagacacgatcggcacactcagcgggttcatcaccgtaatttcactttccgcttcgctgggctcttcctcttcctcttgcgtccgcataccacgcgccactgggtcgtcttcattcagccgccgcactgtgcgcttacctcctttgccatgcttgattagcaccggtgggttgctgaaacccaccatttgtagcgccacatcttctctttcttcctcgctgtccacgattacctctggtgatggcgggcgctcgggcttgggagaagggcgcttctttttcttcttgggcgcaatggccaaatccgccgccgaggtcgatggccgcgggctgggtgtgcgcggcaccagcgcgtcttgtgatgagtcttcctcgtcctcggactcgatacgccgcctcatccgcttttttgggggcgcccggggaggcggcggcgacggggacggggacgacacgtcctccatggttgggggacgtcgcgccgcaccgcgtccgcgctcgggggtggtttcgcgctgctcctcttcccgactggccatttccttctcctataggcagaaaaagatcatggagtcagtcgagaagaaggacagcctaaccgccccctctgagttcgccaccaccgcctccaccgatgccgccaacgcgcctaccaccttccccgtcgaggcacccccgcttgaggaggaggaagtgattatcgagcaggacccaggttttgtaagcgaagacgacgaggaccgctcagtaccaacagaggataaaaagcaagaccaggacaacgcagaggcaaacgaggaacaagtcgggcggggggacgaaaggcatggcgactacctagatgtgggagacgacgtgctgttgaagcatctgcagcgccagtgcgccattatctgcgacgcgttgcaagagcgcagcgatgtgcccctcgccatagcggatgtcagccttgcctacgaacgccacctattctcaccgcgcgtaccccccaaacgccaagaaaacggcacatgcgagcccaacccgcgcctcaacttctaccccgtatttgccgtgccagaggtgcttgccacctatcacatctttttccaaaactgcaagatacccctatcctgccgtgccaaccgcagccgagcggacaagcagctggccttgcggcagggcgctgtcatacctgatatcgcctcgctcaacgaagtgccaaaaatctttgagggtcttggacgcgacgagaagcgcgcggcaaacgctctgcaacaggaaaacagcgaaaatgaaagtcactctggagtgttggtggaactcgagggtgacaacgcgcgcctagccgtactaaaacgcagcatcgaggtcacccactttgcctacccggcacttaacctaccccccaaggtcatgagcacagtcatgagtgagctgatcgtgcgccgtgcgcagcccctggagagggatgcaaatttgcaagaacaaacagaggagggcctacccgcagttggcgacgagcagctagcgcgctggcttcaaacgcgcgagcctgccgacttggaggagcgacgcaaactaatgatggccgcagtgctcgttaccgtggagcttgagtgcatgcagcggttctttgctgacccggagatgcagcgcaagctagaggaaacattgcactacacctttcgacagggctacgtacgccaggcctgcaagatctccaacgtggagctctgcaacctggtctcctaccttggaattttgcacgaaaaccgccttgggcaaaacgtgcttcattccacgctcaagggcgaggcgcgccgcgactacgtccgcgactgcgtttacttatttctatgctacacctggcagacggccatgggcgtttggcagcagtgcttggaggagtgcaacctcaaggagctgcagaaactgctaaagcaaaacttgaaggacctatggacggccttcaacgagcgctccgtggccgcgcacctggcggacatcattttccccgaacgcctgcttaaaaccctgcaacagggtctgccagacttcaccagtcaaagcatgttgcagaactttaggaactttatcctagagcgctcaggaatcttgcccgccacctgctgtgcacttcctagcgactttgtgcccattaagtaccgcgaatgccctccgccgctttggggccactgctaccttctgcagctagccaactaccttgcctaccactctgacataatggaagacgtgagcggtgacggtctactggagtgtcactgtcgctgcaacctatgcaccccgcaccgctccctggtttgcaattcgcagctgcttaacgaaagtcaaattatcggtacctttgagctgcagggtccctcgcctgacgaaaagtccgcggctccggggttgaaactcactccggggctgtggacgtcggcttaccttcgcaaatttgtacctgaggactaccacgcccacgagattaggttctacgaagaccaatcccgcccgcctaatgcggagcttaccgcctgcgtcattacccagggccacattcttggccaattgcaagccatcaacaaagcccgccaagagtttctgctacgaaagggacggggggtttacttggacccccagtccggcgaggagctcaacccaatccccccgccgccgcagccctatcagcagcagccgcgggcccttgcttcccaggatggcacccaaaaagaagctgcagctgccgccgccacccacggacgaggaggaatactgggacagtcaggcagaggaggttttggacgaggaggaggaggacatgatggaagactgggagagcctagacgaggaagcttccgaggtcgaagaggtgtcagacgaaacaccgtcaccctcggtcgcattcccctcgccggcgccccagaaatcggcaaccggttccagcatggctacaacctccgctcctcaggcgccgccggcactgcccgttcgccgacccaaccgtagatgggacaccactggaaccagggccggtaagtccaagcagccgccgccgttagcccaagagcaacaacagcgccaaggctaccgctcatggcgcgggcacaagaacgccatagttgcttgcttgcaagactgtgggggcaacatctccttcgcccgccgctttcttctctaccatcacggcgtggccttcccccgtaacatcctgcattactaccgtcatctctacagcccatactgcaccggcggcagcggcagcaacagcagcggccacacagaagcaaaggcgaccggatagcaagactctgacaaagcccaagaaatccacagcggcggcagcagcaggaggaggagcgctgcgtctggcgcccaacgaacccgtatcgacccgcgagcttagaaacaggatttttcccactctgtatgctatatttcaacagagcaggggccaagaacaagagctgaaaataaaaaacaggtctctgcgatccctcacccgcagctgcctgtatcacaaaagcgaagatcagcttcggcgcacgctggaagacgcggaggctctcttcagtaaatactgcgcgctgactcttaaggactagtttcgcgccctttctcaaatttaagcgcgaaaactacgtcatctccagcggccacacccggcgccagcacctgttgtcagcgccattatgagcaaggaaattcccacgccctacatgtggagttaccagccacaaatgggacttgcggctggagctgcccaagactactcaacccgaataaactacatgagcgcgggaccccacatgatatcccgggtcaacggaatacgcgcccaccgaaaccgaattctcctggaacaggcggctattaccaccacacctcgtaataaccttaatccccgtagttggcccgctgccctggtgtaccaggaaagtcccgctcccaccactgtggtacttcccagagacgcccaggccgaagttcagatgactaactcaggggcgcagcttgcgggcggctttcgtcacagggtgcggtcgcccgggcagggtataactcacctgacaatcagagggcgaggtattcagctcaacgacgagtcggtgagctcctcgcttggtctccgtccggacgggacatttcagatcggcggcgccggccgctcttcattcacgcctcgtcaggcaatcctaactctgcagacctcgtcctctgagccgcgctctggaggcattggaactctgcaatttattgaggagtttgtgccatcggtctactttaaccccttctcgggacctcccggccactatccggatcaatttattcctaactttgacgcggtaaaggactcggcggacggctacgactgaatgttaagtggagaggcagagcaactgcgcctgaaacacctggtccactgtcgccgccacaagtgctttgcccgcgactccggtgagttttgctactttgaattgcccgaggatcatatcgagggcccggcgcacggcgtccggcttaccgcccagggagagcttgcccgtagcctgattcgggagtttacccagcgccccctgctagttgagcgggacaggggaccctgtgttctcactgtgatttgcaactgtcctaaccctggattacatcaagatcctctagttaatgtcaggtcgcctaagtcgattaactagagtacccggggatcttattccctttaactaataaaaaaaaataataaagcatcacttacttaaaatcagttagcaaatttctgtccagtttattcagcagcacctccttgccctcctcccagctctggtattgcagcttcctcctggctgcaaactttctccacaatctaaatggaatgtcagtttcctcctgttcctgtccatccgcacccactatcttcatgttgttgcagatgaagcgcgcaagaccgtctgaagataccttcaaccccgtgtatccatatgacacggaaaccggtcctccaactgtgccttttcttactcctccctttgtatcccccaatgggtttcaagagagtccccctggggtactctctttgcgcctatccgaacctctagttacctccaatggcatgcttgcgctcaaaatgggcaacggcctctctctggacgaggccggcaaccttacctcccaaaatgtaaccactgtgagcccacctctcaaaaaaaccaagtcaaacataaacctggaaatatctgcacccctcacagttacctcagaagccctaactgtggctgccgccgcacctctaatggtcgcgggcaacacactcaccatgcaatcacaggccccgctaaccgtgcacgactccaaacttagcattgccacccaaggacccctcacagtgtcagaaggaaagctagccctgcaaacatcaggccccctcaccaccaccgatagcagtacccttactatcactgcctcaccccctctaactactgccactggtagcttgggcattgacttgaaagagcccatttatacacaaaatggaaaactaggactaaagtacggggctcctttgcatgtaacagacgacctaaacactttgaccgtagcaactggtccaggtgtgactattaataatacttccttgcaaactaaagttactggagccttgggttttgattcacaaggcaatatgcaacttaatgtagcaggaggactaaggattgattctcaaaacagacgccttatacttgatgttagttatccgtttgatgctcaaaaccaactaaatctaagactaggacagggccctctttttataaactcagcccacaacttggatattaactacaacaaaggcctttacttgtttacagcttcaaacaattccaaaaagcttgaggttaacctaagcactgccaaggggttgatgtttgacgctacagccatagccattaatgcaggagatgggcttgaatttggttcacctaatgcaccaaacacaaatcccctcaaaacaaaaattggccatggcctagaatttgattcaaacaaggctatggttcctaaactaggaactggccttagttttgacagcacaggtgccattacagtaggaaacaaaaataatgataagctaactttgtggaccggaataaaccctccacctaactgtcaaattgtggaaaacactaatacaaatgatggcaaacttactttagtattagtaaaaaatggagggcttgttaatggctacgtgtctctagttggtgtatcagacactgtgaaccaaatgttcacacaaaagacagcaaacatccaattaagattatattttgactcttctggaaatctattaactgaggaatcagacttaaaaattccacttaaaaataaatcttctacagcgaccagtgaaactgtagccagcagcaaagcctttatgccaagtactacagcttatcccttcaacaccactactagggatagtgaaaactacattcatggaatatgttactacatgactagttatgatagaagtctatttcccttgaacatttctataatgctaaacagccgtatgatttcttccaatgttgcctatgccatacaatttgaatggaatctaaatgcaagtgaatctccagaaagcaacatagctacgctgaccacatccccctttttcttttcttacattacagaagacgacaactaaagaatcgtttgtgttatgtttcaacgtgtttatttttcaattgcagaaaatttcaagtcatttttcattcagtagtatagccccaccaccacatagcttatacagatcaccgtaccttaatcaaactcacagaaccctagtattcaacctgccacctccctcccaacacacagagtacacagtcctttctccccggctggccttaaaaagcatcatatcatgggtaacagacatattcttaggtgttatattccacacggtttcctgtcgagccaaacgctcatcagtgatattaataaactccccgggcagctcacttaagttcatgtcgctgtccagctgctgagccacaggctgctgtccaacttgcggttgcttaacgggcggcgaaggagaagtccacgcgttgtgcattgtcaaagtgttacattcgggcagcagcggatgatcctccagtatggtagcgcgggtttctgtctcaaaaggaggtagacgatccctactgtacggagtgcgccgagacaaccgagatcgtgttggtcgtagtgtcatgccaaatggaacgccggacgtagtcatatttcctgaagcaaaaccaggtgcgggcgtgacaaacagatctgcgtctccggtctcgccgcttagatcgctctgtgtagtagttgtagtatatccactctctcaaagcatccaggcgccccctggcttcgggttctatgtaaactccttcatgcgccgctgccctgataacatccaccaccgcagaataagccacacccagccaacctacacattcgttctgcgagtcacacacgggaggagcgggaagagctggaagaaccatgtttttttttttattccaaaagattatccaaaacctcaaaatgaagatctattaagtgaacgcgctcccctccggtggcgtggtcaaactctacagccaaagaacagataatggcatttgtaagatgttgcacaatggcttccaaaaggcaaacggccctcacgtccaagtggacgtaaaggctaaacccttcagggtgaatctcctctataaacattccagcaccttcaaccatgcccaaataattctcatctcgccaccttctcaatatatctctaagcaaatcccgaatattaagtccggccattgtaaaaatctgctccagagcgccctccaccttcagcctcaagcagcgaatcatgattgcaaaaattcaggttcctcacagacctgtataagattcaaaagcggaacattaacaaaaataccgcgatcccgtaggtcccttcgcagggccagctgaacataatcgtgcaggtctgcacggaccagcgcggccacttccccgccaggaaccatgacaaaagaacccacactgattatgacacgcatactcggagctatgctaaccagcgtagccccgatgtaagcttgttgcatgggcggcgatataaaatgcaaggtgctgctcaaaaaatcaggcaaagcctcgcgcaaaaaagaaagcacatcgtagtcatgctcatgcagataaaggcaggtaagctccggaaccaccacagaaaaagacaccatttttctctcaaacatgtctgcgggtttctgcataaacacaaaataaaataacaaaaaaacatttaaacattagaagcctgtcttacaacaggaaaaacaacccttataagcataagacggactacggccatgccggcgtgaccgtaaaaaaactggtcaccgtgattaaaaagcaccaccgacagctcctcggtcatgtccggagtcataatgtaagactcggtaaacacatcaggttgattcacatcggtcagtgctaaaaagcgaccgaaatagcccgggggaatacatacccgcaggcgtagagacaacattacagcccccataggaggtataacaaaattaataggagagaaaaacacataaacacctgaaaaaccctcctgcctaggcaaaatagcaccctcccgctccagaacaacatacagcgcttccacagcggcagccataacagtcagccttaccagtaaaaaagaaaacctattaaaaaaacaccactcgacacggcaccagctcaatcagtcacagtgtaaaaaagggccaagtgcagagcgagtatatataggactaaaaaatgacgtaacggttaaagtccacaaaaaacacccagaaaaccgcacgcgaacctacgcccagaaacgaaagccaaaaaacccacaacttcctcaaatcgtcacttccgttttcccacgttacgtcacttcccattttaagaaaactacaattcccaacacatacaagttactccgccctaaaacctacgtcacccgccccgttcccacgccccgcgccacgtcacaaactccaccccctcattatcatattggcttcaatccaaaataaggtatattattgatgatg

SEQ ID NO: 34 - DNA, 36425 bp, Artificial Sequence
  Adk35F2-Spike/E4orf6(mPGK)-E4dl-12(E4re#32)
ttaattaacatcatcaataatataccttattttggattgaagccaatatgataatgagggggtggagtttgtgacgtggcgcggggcgtgggaacggggcgggtgacgtagtagtgtggcggaagtgtgatgttgcaagtgtggcggaacacatgtaagcgacggatgtggcaaaagtgacgtttttggtgtgcgccggtgtacacaggaagtgacaattttcgcgcggttttaggcggatgttgtagtaaatttgggcgtaaccgagtaagatttggccattttcgcgggaaaactgaataagaggaagtgaaatctgaataattttgtgttactcatagcgcgtaataatttctgtaatagtaatcaattacggggtcattagttcatagcccatatatggagttccgcgttacataacttacggtaaatggcccgcctggctgaccgcccaacgacccccgcccattgacgtcaataatgacgtatgttcccatagtaacgccaatagggactttccattgacgtcaatgggtggagtatttacggtaaactgcccacttggcagtacatcaagtgtatcatatgccaagtacgccccctattgacgtcaatgacggtaaatggcccgcctggcattatgcccagtacatgaccttatgggactttcctacttggcagtacatctacgtattagtcatcgctattaccatggtgatgcggttttggcagtacatcaatgggcgtggatagcggtttgactcacggggatttccaagtctccaccccattgacgtcaatgggagtttgttttggcaccaaaatcaacgggactttccaaaatgtcgtaacaactccgccccattgacgcaaatgggcggtaggcgtgtacggtgggaggtctatataagcagagctctccctatcagtgatagagatctccctatcagtgatagagatcgtcgacgagctcgtttagtgaaccgtcagatcgcctggagacgccatccacgctgttttgacctccatagaagacaccgggaccgatccagcctccgatttgccaccatgtttgtgttcctggtgctgctgccactggtgtccagccagtgtgtgaacctgaccaccaggacccaacttcctcctgcctacaccaactccttcaccaggggagtctactaccctgacaaggtgttcaggtcctctgtgctgcacagcacccaggacctgttcctgccattcttcagcaatgtgacctggttccatgccatccatgtgtctggcaccaatggcaccaagaggtttgacaaccctgtgctgccattcaatgatggagtctactttgccagcacagagaagagcaacatcatcaggggctggatttttggcaccaccctggacagcaagacccagtccctgctgattgtgaacaatgccaccaatgtggtgattaaggtgtgtgagttccagttctgtaatgacccattcctgggagtctactaccacaagaacaacaagtcctggatggagtctgagttcagggtctactcctctgccaacaactgtacctttgaatatgtgagccaaccattcctgatggacttggagggcaagcagggcaacttcaagaacctgagggagtttgtgttcaagaacattgatggctacttcaagatttacagcaaacacacaccaatcaacctggtgagggacctgccacagggcttctctgccttggaaccactggtggacctgccaattggcatcaacatcaccaggttccagaccctgctggctctgcacaggtcctacctgacacctggagactcctcctctggctggacagcaggagcagcagcctactatgtgggctacctccaaccaaggaccttcctgctgaaatacaatgagaatggcaccatcacagatgctgtggactgtgccctggacccactgtctgagaccaagtgtaccctgaaatccttcacagtggagaagggcatctaccagaccagcaacttcagggtccaaccaacagagagcattgtgaggtttccaaacatcaccaacctgtgtccatttggagaggtgttcaatgccaccaggtttgcctctgtctatgcctggaacaggaagaggattagcaactgtgtggctgactactctgtgctctacaactctgcctccttcagcaccttcaagtgttatggagtgagcccaaccaaactgaatgacctgtgtttcaccaatgtctatgctgactcctttgtgattaggggagatgaggtgagacagattgcccctggacaaacaggcaagattgctgactacaactacaaactgcctgatgacttcacaggctgtgtgattgcctggaacagcaacaacctggacagcaaggtgggaggcaactacaactacctctacagactgttcaggaagagcaacctgaaaccatttgagagggacatcagcacagagatttaccaggctggcagcacaccatgtaatggagtggagggcttcaactgttactttccactccaatcctatggcttccaaccaaccaatggagtgggctaccaaccatacagggtggtggtgctgtcctttgaactgctccatgcccctgccacagtgtgtggaccaaagaagagcaccaacctggtgaagaacaagtgtgtgaacttcaacttcaatggactgacaggcacaggagtgctgacagagagcaacaagaagttcctgccattccaacagtttggcagggacattgctgacaccacagatgctgtgagggacccacagaccttggagattctggacatcacaccatgttcctttggaggagtgtctgtgattacacctggcaccaacaccagcaaccaggtggctgtgctctaccaggatgtgaactgtactgaggtgcctgtggctatccatgctgaccaacttacaccaacctggagggtctacagcacaggcagcaatgtgttccagaccagggctggctgtctgattggagcagagcatgtgaacaactcctatgagtgtgacatcccaattggagcaggcatctgtgcctcctaccagacccagaccggtggcggtgggtcgaggtctgtggcaagccagagcatcattgcctacacaatgagtctgggagcagagaactctgtggcttacagcaacaacagcattgccatcccaaccaacttcaccatctctgtgaccacagagattctgcctgtgagtatgaccaagacctctgtggactgtacaatgtatatctgtggagacagcacagagtgtagcaacctgctgctccaatatggctccttctgtacccaacttaacagggctctgacaggcattgctgtggaacaggacaagaacacccaggaggtgtttgcccaggtgaagcagatttacaagacacctccaatcaaggactttggaggcttcaacttcagccagattctgcctgacccaagcaagccaagcaagaggtccttcattgaggacctgctgttcaacaaggtgaccctggctgatgctggcttcatcaagcaatatggagactgtctgggagacattgctgccagggacctgatttgtgcccagaagttcaatggactgacagtgctgcctccactgctgacagatgagatgattgcccaatacacctctgccctgctggctggcaccatcacctctggctggacctttggagcaggagcagccctccaaatcccatttgctatgcagatggcttacaggttcaatggcattggagtgacccagaatgtgctctatgagaaccagaaactgattgccaaccagttcaactctgccattggcaagattcaggactccctgtccagcacagcctctgccctgggcaaactccaagatgtggtgaaccagaatgcccaggctctgaacaccctggtgaagcaactttccagcaactttggagccatctcctctgtgctgaatgacatcctgagcagactggacaaggtggaggctgaggtccagattgacagactgattacaggcagactccaatccctccaaacctatgtgacccaacaacttatcagggctgctgagattagggcatctgccaacctggctgccaccaagatgagtgagtgtgtgctgggacaaagcaagagggtggacttctgtggcaagggctaccacctgatgagttttccacagtctgcccctcatggagtggtgttcctgcatgtgacctatgtgcctgcccaggagaagaacttcaccacagcccctgccatctgccatgatggcaaggctcactttccaagggagggagtgtttgtgagcaatggcacccactggtttgtgacccagaggaacttctatgaaccacagattatcaccacagacaacacctttgtgtctggcaactgtgatgtggtgattggcattgtgaacaacacagtctatgacccactccaacctgaactggactccttcaaggaggaactggacaaatacttcaagaaccacaccagccctgatgtggacctgggagacatctctggcatcaatgcctctgtggtgaacatccagaaggagattgacagactgaatgaggtggctaagaacctgaatgagtccctgattgacctccaagaactgggcaaatatgaacaatacatcaagtggccatgaaaattgatcataatcagccataccacatttgtagaggttttacttgctttaaaaaacctcccacacctccccctgaacctgaaacataaaatgaatgcaattgttgttgttaacttgtttattgcagcttataatggttacaaataaagcaatagcatcacaaatttcacaaataaagcatttttttcactgcattctagttgtggtttgtccaaactcatcaatgtatcttaacgcggatcgggtaggggaggcgcttttcccaaggcagtctggagcatgcgctttagcagccccgctgggcacttggcgctacacaagtggcctctggcctcgcacacattccacatccaccggtaggcgccaaccggctccgttctttggtggccccttcgcgccaccttctactcctcccctagtcaggaagttcccccccgccccgcagctcgcgtcgtgcaggacgtgacaaatggaagtagcacgtctcactagtctcgtgcagatggacagcaccgctgagcaatggaagcgggtaggcctttggggcagcggccaatagcagctttgctccttcgctttctgggctcagaggctgggaaggggtgggtccgggggcgggctcaggggcgggctcaggggcggggcgggcgcccgaaggtcctccggaggcccggcattctgcacgcttcaaaagcgcacgtctgccgcgctgttctcctcttcctcatctccgggcctttcgaaactaccccaagctggccaccatgactacgtccggcgttccatttggcatgacactacgaccaacacgatctcggttgtctcggcgcactccgtacagtagggatcgtctacctccttttgagacagaaacccgcgctaccatactggaggatcatccgctgctgcccgaatgtaacactttgacaatgcacaacgtgagttacgtgcgaggtcttccctgcagtgtgggatttacgctgattcaggaatgggttgttccctgggatatggttctaacgcgggaggagcttgtaatcctgaggaagtgtatgcacgtgtgcctgtgttgtgccaacattgatatcatgacgagcatgatgatccatggttacgagtcctgggctctccactgtcattgttccagtcccggttccctgcagtgtatagccggcgggcaggttttggccagctggtttaggatggtggtggatggcgccatgtttaatcagaggtttatatggtaccgggaggtggtgaattacaacatgccaaaagaggtaatgtttatgtccagcgtgtttatgaggggtcgccacttaatctacctgcgcttgtggtatgatggccacgtgggttctgtggtccccgccatgagctttggatacagcgccttgcactgtgggattttgaacaatattgtggtgctgtgctgcagttactgtgctgatttaagtgagatcagggtgcgctgctgtgcccggaggacaaggcgccttatgctgcgggcggtgcgaatcatcgctgaggagaccactgccatgttgtattcctgcaggacggagcggcggcggcagcagtttattcgcgcgctgctgcagcaccaccgccctatcctgatgcacgattatgactctacccccatgtagaagcttggggatcaattctctagagctcgctgatcagcctcgactgtgccttctagttgccagccatctgttgtttgcccctcccccgtgccttccttgaccctggaaggtgccactcccactgtcctttcctaataaaatgaggaaattgcatcgcattgtctgagtaggtgtcattctattctggggggtggggtggggcaggacagcaagggggaggattgggaagacaatagcaggcatgctggggatgcggtgggctctatggcttctgaggaaattgggcgtggcttaagggtgggaaagaatatataaggtgggggtcttatgtagttttgtatctgttttgcagcagccgccgccgccatgagcaccaactcgtttgatggaagcattgtgagctcatatttgacaacgcgcatgcccccatgggccggggtgcgtcagaatgtgatgggctccagcattgatggtcgccccgtcctgcccgcaaactctactaccttgacctacgagaccgtgtctggaacgccgttggagactgcagcctccgccgccgcttcagccgctgcagccaccgcccgcgggattgtgactgactttgctttcctgagcccgcttgcaagcagtgcagcttcccgttcatccgcccgcgatgacaagttgacggctcttttggcacaattggattctttgacccgggaacttaatgtcgtttctcagcagctgttggatctgcgccagcaggtttctgccctgaaggcttcctcccctcccaatgcggtttaaaacataaataaaaaaccagactctgtttggatttggatcaagcaagtgtcttgctgtctttatttaggggttttgcgcgcgcggtaggcccgggaccagcggtctcggtcgttgagggtcctgtgtattttttccaggacgtggtaaaggtgactctggatgttcagatacatgggcataagcccgtctctggggtggaggtagcaccactgcagagcttcatgctgcggggtggtgttgtagatgatccagtcgtagcaggagcgctgggcgtggtgcctaaaaatgtctttcagtagcaagctgattgccaggggcaggcccttggtgtaagtgtttacaaagcggttaagctgggatgggtgcatacgtggggatatgagatgcatcttggactgtatttttaggttggctatgttcccagccatatccctccggggattcatgttgtgcagaaccaccagcacagtgtatccggtgcacttgggaaatttgtcatgtagcttagaaggaaatgcgtggaagaacttggagacgcccttgtgacctccaagattttccatgcattcgtccataatgatggcaatgggcccacgggcggcggcctgggcgaagatatttctgggatcactaacgtcatagttgtgttccaggatgagatcgtcataggccatttttacaaagcgcgggcggagggtgccagactgcggtataatggttccatccggcccaggggcgtagttaccctcacagatttgcatttcccacgctttgagttcagatggggggatcatgtctacctgcggggcgatgaagaaaacggtttccggggtaggggagatcagctgggaagaaagcaggttcctgagcagctgcgacttaccgcagccggtgggcccgtaaatcacacctattaccggctgcaactggtagttaagagagctgcagctgccgtcatccctgagcaggggggccacttcgttaagcatgtccctgactcgcatgttttccctgaccaaatccgccagaaggcgctcgccgcccagcgatagcagttcttgcaaggaagcaaagtttttcaacggtttgagaccgtccgccgtaggcatgcttttgagcgtttgaccaagcagttccaggcggtcccacagctcggtcacctgctctacggcatctcgatccagcatatctcctcgtttcgcgggttggggcggctttcgctgtacggcagtagtcggtgctcgtccagacgggccagggtcatgtctttccacgggcgcagggtcctcgtcagcgtagtctgggtcacggtgaaggggtgcgctccgggctgcgcgctggccagggtgcgcttgaggctggtcctgctggtgctgaagcgctgccggtcttcgccctgcgcgtcggccaggtagcatttgaccatggtgtcatagtccagcccctccgcggcgtggcccttggcgcgcagcttgcccttggaggaggcgccgcacgaggggcagtgcagacttttgagggcgtagagcttgggcgcgagaaataccgattccggggagtaggcatccgcgccgcaggccccgcagacggtctcgcattccacgagccaggtgagctctggccgttcggggtcaaaaaccaggtttcccccatgctttttgatgcgtttcttacctctggtttccatgagccggtgtccacgctcggtgacgaaaaggctgtccgtgtccccgtatacagacttgagaggcctgtcctcgagcggtgttccgcggtcctcctcgtatagaaactcggaccactctgagacaaaggctcgcgtccaggccagcacgaaggaggctaagtgggaggggtagcggtcgttgtccactagggggtccactcgctccagggtgtgaagacacatgtcgccctcttcggcatcaaggaaggtgattggtttgtaggtgtaggccacgtgaccgggtgttcctgaaggggggctataaaagggggtgggggcgcgttcgtcctcactctcttccgcatcgctgtctgcgagggccagctgttggggtgagtactccctctgaaaagcgggcatgacttctgcgctaagattgtcagtttccaaaaacgaggaggatttgatattcacctggcccgcggtgatgcctttgagggtggccgcatccatctggtcagaaaagacaatctttttgttgtcaagcttggtggcaaacgacccgtagagggcgttggacagcaacttggcgatggagcgcagggtttggtttttgtcgcgatcggcgcgctccttggccgcgatgtttagctgcacgtattcgcgcgcaacgcaccgccattcgggaaagacggtggtgcgctcgtcgggcaccaggtgcacgcgccaaccgcggttgtgcagggtgacaaggtcaacgctggtggctacctctccgcgtaggcgctcgttggtccagcagaggcggccgcccttgcgcgagcagaatggcggtagggggtctagctgcgtctcgtccggggggtctgcgtccacggtaaagaccccgggcagcaggcgcgcgtcgaagtagtctatcttgcatccttgcaagtctagcgcctgctgccatgcgcgggcggcaagcgcgcgctcgtatgggttgagtgggggaccccatggcatggggtgggtgagcgcggaggcgtacatgccgcaaatgtcgtaaacgtagaggggctctctgagtattccaagatatgtagggtagcatcttccaccgcggatgctggcgcgcacgtaatcgtatagttcgtgcgagggagcgaggaggtcgggaccgaggttgctacgggcgggctgctctgctcggaagactatctgcctgaagatggcatgtgagttggatgatatggttggacgctggaagacgttgaagctggcgtctgtgagacctaccgcgtcacgcacgaaggaggcgtaggagtcgcgcagcttgttgaccagctcggcggtgacctgcacgtctagggcgcagtagtccagggtttccttgatgatgtcatacttatcctgtcccttttttttccacagctcgcggttgaggacaaactcttcgcggtctttccagtactcttggatcggaaacccgtcggcctccgaacggtaagagcctagcatgtagaactggttgacggcctggtaggcgcagcatcccttttctacgggtagcgcgtatgcctgcgcggccttccggagcgaggtgtgggtgagcgcaaaggtgtccctgaccatgactttgaggtactggtatttgaagtcagtgtcgtcgcatccgccctgctcccagagcaaaaagtccgtgcgctttttggaacgcggatttggcagggcgaaggtgacatcgttgaagagtatctttcccgcgcgaggcataaagttgcgtgtgatgcggaagggtcccggcacctcggaacggttgttaattacctgggcggcgagcacgatctcgtcaaagccgttgatgttgtggcccacaatgtaaagttccaagaagcgcgggatgcccttgatggaaggcaattttttaagttcctcgtaggtgagctcttcaggggagctgagcccgtgctctgaaagggcccagtctgcaagatgagggttggaagcgacgaatgagctccacaggtcacgggccattagcatttgcaggtggtcgcgaaaggtcctaaactggcgacctatggccattttttctggggtgatgcagtagaaggtaagcgggtcttgttcccagcggtcccatccaaggttcgcggctaggtctcgcgcggcagtcactagaggctcatctccgccgaacttcatgaccagcatgaagggcacgagctgcttcccaaaggcccccatccaagtataggtctctacatcgtaggtgacaaagagacgctcggtgcgaggatgcgagccgatcgggaagaactggatctcccgccaccaattggaggagtggctattgatgtggtgaaagtagaagtccctgcgacgggccgaacactcgtgctggcttttgtaaaaacgtgcgcagtactggcagcggtgcacgggctgtacatcctgcacgaggttgacctgacgaccgcgcacaaggaagcagagtgggaatttgagcccctcgcctggcgggtttggctggtggtcttctacttcggctgcttgtccttgaccgtctggctgctcgaggggagttacggtggatcggaccaccacgccgcgcgagcccaaagtccagatgtccgcgcgcggcggtcggagcttgatgacaacatcgcgcagatgggagctgtccatggtctggagctcccgcggcgtcaggtcaggcgggagctcctgcaggtttacctcgcatagacgggtcagggcgcgggctagatccaggtgatacctaatttccaggggctggttggtggcggcgtcgatggcttgcaagaggccgcatccccgcggcgcgactacggtaccgcgcggcgggcggtgggccgcgggggtgtccttggatgatgcatctaaaagcggtgacgcgggcgagcccccggaggtagggggggctccggacccgccgggagagggggcaggggcacgtcggcgccgcgcgcgggcaggagctggtgctgcgcgcgtaggttgctggcgaacgcgacgacgcggcggttgatctcctgaatctggcgcctctgcgtgaagacgacgggcccggtgagcttgaacctgaaagagagttcgacagaatcaatttcggtgtcgttgacggcggcctggcgcaaaatctcctgcacgtctcctgagttgtcttgataggcgatctcggccatgaactgctcgatctcttcctcctggagatctccgcgtccggctcgctccacggtggcggcgaggtcgttggaaatgcgggccatgagctgcgagaaggcgttgaggcctccctcgttccagacgcggctgtagaccacgcccccttcggcatcgcgggcgcgcatgaccacctgcgcgagattgagctccacgtgccgggcgaagacggcgtagtttcgcaggcgctgaaagaggtagttgagggtggtggcggtgtgttctgccacgaagaagtacataacccagcgtcgcaacgtggattcgttgatatcccccaaggcctcaaggcgctccatggcctcgtagaagtccacggcgaagttgaaaaactgggagttgcgcgccgacacggttaactcctcctccagaagacggatgagctcggcgacagtgtcgcgcacctcgcgctcaaaggctacaggggcctcttcttcttcttcaatctcctcttccataagggcctccccttcttcttcttctggcggcggtgggggaggggggacacggcggcgacgacggcgcaccgggaggcggtcgacaaagcgctcgatcatctccccgcggcgacggcgcatggtctcggtgacggcgcggccgttctcgcgggggcgcagttggaagacgccgcccgtcatgtcccggttatgggttggcggggggctgccatgcggcagggatacggcgctaacgatgcatctcaacaattgttgtgtaggtactccgccgccgagggacctgagcgagtccgcatcgaccggatcggaaaacctctcgagaaaggcgtctaaccagtcacagtcgcaaggtaggctgagcaccgtggcgggcggcagcgggcggcggtcggggttgtttctggcggaggtgctgctgatgatgtaattaaagtaggcggtcttgagacggcggatggtcgacagaagcaccatgtccttgggtccggcctgctgaatgcgcaggcggtcggccatgccccaggcttcgttttgacatcggcgcaggtctttgtagtagtcttgcatgagcctttctaccggcacttcttcttctccttcctcttgtcctgcatctcttgcatctatcgctgcggcggcggcggagtttggccgtaggtggcgccctcttcctcccatgcgtgtgaccccgaagcccctcatcggctgaagcagggctaggtcggcgacaacgcgctcggctaatatggcctgctgcacctgcgtgagggtagactggaagtcatccatgtccacaaagcggtggtatgcgcccgtgttgatggtgtaagtgcagttggccataacggaccagttaacggtctggtgacccggctgcgagagctcggtgtacctgagacgcgagtaagccctcgagtcaaatacgtagtcgttgcaagtccgcaccaggtactggtatcccaccaaaaagtgcggcggcggctggcggtagaggggccagcgtagggtggccggggctccgggggcgagatcttccaacataaggcgatgatatccgtagatgtacctggacatccaggtgatgccggcggcggtggtggaggcgcgcggaaagtcgcggacgcggttccagatgttgcgcagcggcaaaaagtgctccatggtcgggacgctctggccggtcaggcgcgcgcaatcgttgacgctctagcgtgcaaaaggagagcctgtaagcgggcactcttccgtggtctggtggataaattcgcaagggtatcatggcggacgaccggggttcgagccccgtatccggccgtccgccgtgatccatgcggttaccgcccgcgtgtcgaacccaggtgtgcgacgtcagacaacgggggagtgctccttttggcttccttccaggcgcggcggctgctgcgctagcttttttggccactggccgcgcgcagcgtaagcggttaggctggaaagcgaaagcattaagtggctcgctccctgtagccggagggttattttccaagggttgagtcgcgggacccccggttcgagtctcggaccggccggactgcggcgaacgggggtttgcctccccgtcatgcaagaccccgcttgcaaattcctccggaaacagggacgagccccttttttgcttttcccagatgcatccggtgctgcggcagatgcgcccccctcctcagcagcggcaagagcaagagcagcggcagacatgcagggcaccctcccctcctcctaccgcgtcaggaggggcgacatccgcggttgacgcggcagcagatggtgattacgaacccccgcggcgccgggcccggcactacctggacttggaggagggcgagggcctggcgcggctaggagcgccctctcctgagcggcacccaagggtgcagctgaagcgtgatacgcgtgaggcgtacgtgccgcggcagaacctgtttcgcgaccgcgagggagaggagcccgaggagatgcgggatcgaaagttccacgcagggcgcgagctgcggcatggcctgaatcgcgagcggttgctgcgcgaggaggactttgagcccgacgcgcgaaccgggattagtcccgcgcgcgcacacgtggcggccgccgacctggtaaccgcatacgagcagacggtgaaccaggagattaactttcaaaaaagctttaacaaccacgtgcgtacgcttgtggcgcgcgaggaggtggctataggactgatgcatctgtgggactttgtaagcgcgctggagcaaaacccaaatagcaagccgctcatggcgcagctgttccttatagtgcagcacagcagggacaacgaggcattcagggatgcgctgctaaacatagtagagcccgagggccgctggctgctcgatttgataaacatcctgcagagcatagtggtgcaggagcgcagcttgagcctggctgacaaggtggccgccatcaactattccatgcttagcctgggcaagttttacgcccgcaagatataccataccccttacgttcccatagacaaggaggtaaagatcgaggggttctacatgcgcatggcgctgaaggtgcttaccttgagcgacgacctgggcgtttatcgcaacgagcgcatccacaaggccgtgagcgtgagccggcggcgcgagctcagcgaccgcgagctgatgcacagcctgcaaagggccctggctggcacgggcagcggcgatagagaggccgagtcctactttgacgcgggcgctgacctgcgctgggccccaagccgacgcgccctggaggcagctggggccggacctgggctggcggtggcacccgcgcgcgctggcaacgtcggcggcgtggaggaatatgacgaggacgatgagtacgagccagaggacggcgagtactaagcggtgatgtttctgatcagatgatgcaagacgcaacggacccggcggtgcgggcggcgctgcagagccagccgtccggccttaactccacggacgactggcgccaggtcatggaccgcatcatgtcgctgactgcgcgcaatcctgacgcgttccggcagcagccgcaggccaaccggctctccgcaattctggaagcggtggtcccggcgcgcgcaaaccccacgcacgagaaggtgctggcgatcgtaaacgcgctggccgaaaacagggccatccggcccgacgaggccggcctggtctacgacgcgctgcttcagcgcgtggctcgttacaacagcggcaacgtgcagaccaacctggaccggctggtgggggatgtgcgcgaggccgtggcgcagcgtgagcgcgcgcagcagcagggcaacctgggctccatggttgcactaaacgccttcctgagtacacagcccgccaacgtgccgcggggacaggaggactacaccaactttgtgagcgcactgcggctaatggtgactgagacaccgcaaagtgaggtgtaccagtctgggccagactattttttccagaccagtagacaaggcctgcagaccgtaaacctgagccaggctttcaaaaacttgcaggggctgtggggggtgcgggctcccacaggcgaccgcgcgaccgtgtctagcttgctgacgcccaactcgcgcctgttgctgctgctaatagcgcccttcacggacagtggcagcgtgtcccgggacacatacctaggtcacttgctgacactgtaccgcgaggccataggtcaggcgcatgtggacgagcatactttccaggagattacaagtgtcagccgcgcgctggggcaggaggacacgggcagcctggaggcaaccctaaactacctgctgaccaaccggcggcagaagatcccctcgttgcacagtttaaacagcgaggaggagcgcattttgcgctacgtgcagcagagcgtgagccttaacctgatgcgcgacggggtaacgcccagcgtggcgctggacatgaccgcgcgcaacatggaaccgggcatgtatgcctcaaaccggccgtttatcaaccgcctaatggactacttgcatcgcgcggccgccgtgaaccccgagtatttcaccaatgccatcttgaacccgcactggctaccgccccctggtttctacaccgggggattcgaggtgcccgagggtaacgatggattcctctgggacgacatagacgacagcgtgttttccccgcaaccgcagaccctgctagagttgcaacagcgcgagcaggcagaggcggcgctgcgaaaggaaagcttccgcaggccaagcagcttgtccgatctaggcgctgcggccccgcggtcagatgctagtagcccatttccaagcttgatagggtctcttaccagcactcgcaccacccgcccgcgcctgctgggcgaggaggagtacctaaacaactcgctgctgcagccgcagcgcgaaaaaaacctgcctccggcatttcccaacaacgggatagagagcctagtggacaagatgagtagatggaagacgtacgcgcaggagcacagggacgtgccaggcccgcgcccgcccacccgtcgtcaaaggcacgaccgtcagcggggtctggtgtgggaggacgatgactcggcagacgacagcagcgtcctggatttgggagggagtggcaacccgtttgcgcaccttcgccccaggctggggagaatgttttaaaaaaaaaaaagcatgatgcaaaataaaaaactcaccaaggccatggcaccgagcgttggttttcttgtattccccttagtatgcggcgcgcggcgatgtatgaggaaggtcctcctccctcctacgagagtgtggtgagcgcggcgccagtggcggcggcgctgggttctcccttcgatgctcccctggacccgccgtttgtgcctccgcggtacctgcggcctaccggggggagaaacagcatccgttactctgagttggcacccctattcgacaccacccgtgtgtacctggtggacaacaagtcaacggatgtggcatccctgaactaccagaacgaccacagcaactttctgaccacggtcattcaaaacaatgactacagcccgggggaggcaagcacacagaccatcaatcttgacgaccggtcgcactggggcggcgacctgaaaaccatcctgcataccaacatgccaaatgtgaacgagttcatgtttaccaataagtttaaggcgcgggtgatggtgtcgcgcttgcctactaaggacaatcaggtggagctgaaatacgagtgggtggagttcacgctgcccgagggcaactactccgagaccatgaccatagaccttatgaacaacgcgatcgtggagcactacttgaaagtgggcagacagaacggggttctggaaagcgacatcggggtaaagtttgacacccgcaacttcagactggggtttgaccccgtcactggtcttgtcatgcctggggtatatacaaacgaagccttccatccagacatcattttgctgccaggatgcggggtggacttcacccacagccgcctgagcaacttgttgggcatccgcaagcggcaacccttccaggagggctttaggatcacctacgatgatctggagggtggtaacattcccgcactgttggatgtggacgcctaccaggcgagcttgaaagatgacaccgaacagggcgggggtggcgcaggcggcagcaacagcagtggcagcggcgcggaagagaactccaacgcggcagccgcggcaatgcagccggtggaggacatgaacgatcatgccattcgcggcgacacctttgccacacgggctgaggagaagcgcgctgaggccgaagcagcggccgaagctgccgcccccgctgcgcaacccgaggtcgagaagcctcagaagaaaccggtgatcaaacccctgacagaggacagcaagaaacgcagttacaacctaataagcaatgacagcaccttcacccagtaccgcagctggtaccttgcatacaactacggcgaccctcagaccggaatccgctcatggaccctgctttgcactcctgacgtaacctgcggctcggagcaggtctactggtcgttgccagacatgatgcaagaccccgtgaccttccgctccacgcgccagatcagcaactttccggtggtgggcgccgagctgttgcccgtgcactccaagagcttctacaacgaccaggccgtctactcccaactcatccgccagtttacctctctgacccacgtgttcaatcgctttcccgagaaccagattttggcgcgcccgccagcccccaccatcaccaccgtcagtgaaaacgttcctgctctcacagatcacgggacgctaccgctgcgcaacagcatcggaggagtccagcgagtgaccattactgacgccagacgccgcacctgcccctacgtttacaaggccctgggcatagtctcgccgcgcgtcctatcgagccgcactttttgagcaagcatgtccatccttatatcgcccagcaataacacaggctggggcctgcgcttcccaagcaagatgtttggcggggccaagaagcgctccgaccaacacccagtgcgcgtgcgcgggcactaccgcgcgccctggggcgcgcacaaacgcggccgcactgggcgcaccaccgtcgatgacgccatcgacgcggtggtggaggaggcgcgcaactacacgcccacgccgccaccagtgtccacagtggacgcggccattcagaccgtggtgcgcggagcccggcgctatgctaaaatgaagagacggcggaggcgcgtagcacgtcgccaccgccgccgacccggcactgccgcccaacgcgcggcggcggccctgcttaaccgcgcacgtcgcaccggccgacgggcggccatgcgggccgctcgaaggctggccgcgggtattgtcactgtgccccccaggtccaggcgacgagcggccgccgcagcagccgcggccattagtgctatgactcagggtcgcaggggcaacgtgtattgggtgcgcgactcggttagcggcctgcgcgtgcccgtgcgcacccgccccccgcgcaactagattgcaagaaaaaactacttagactcgtactgttgtatgtatccagcggcggcggcgcgcaacgaagctatgtccaagcgcaaaatcaaagaagagatgctccaggtcatcgcgccggagatctatggccccccgaagaaggaagagcaggattacaagccccgaaagctaaagcgggtcaaaaagaaaaagaaagatgatgatgatgaacttgacgacgaggtggaactgctgcacgctaccgcgcccaggcgacgggtacagtggaaaggtcgacgcgtaaaacgtgttttgcgacccggcaccaccgtagtctttacgcccggtgagcgctccacccgcacctacaagcgcgtgtatgatgaggtgtacggcgacgaggacctgcttgagcaggccaacgagcgcctcggggagtttgcctacggaaagcggcataaggacatgctggcgttgccgctggacgagggcaacccaacacctagcctaaagcccgtaacactgcagcaggtgctgcccgcgcttgcaccgtccgaagaaaagcgcggcctaaagcgcgagtctggtgacttggcacccaccgtgcagctgatggtacccaagcgccagcgactggaagatgtcttggaaaaaatgaccgtggaacctgggctggagcccgaggtccgcgtgcggccaatcaagcaggtggcgccgggactgggcgtgcagaccgtggacgttcagatacccactaccagtagcaccagtattgccaccgccacagagggcatggagacacaaacgtccccggttgcctcagcggtggcggatgccgcggtgcaggcggtcgctgcggccgcgtccaagacctctacggaggtgcaaacggacccgtggatgtttcgcgtttcagccccccggcgcccgcgccgttcgaggaagtacggcgccgccagcgcgctactgcccgaatatgccctacatccttccattgcgcctacccccggctatcgtggctacacctaccgccccagaagacgagcaactacccgacgccgaaccaccactggaacccgccgccgccgtcgccgtcgccagcccgtgctggccccgatttccgtgcgcagggtggctcgcgaaggaggcaggaccctggtgctgccaacagcgcgctaccaccccagcatcgtttaaaagccggtctttgtggttcttgcagatatggccctcacctgccgcctccgtttcccggtgccgggattccgaggaagaatgcaccgtaggaggggcatggccggccacggcctgacgggcggcatgcgtcgtgcgcaccaccggcggcggcgcgcgtcgcaccgtcgcatgcgcggcggtatcctgcccctccttattccactgatcgccgcggcgattggcgccgtgcccggaattgcatccgtggccttgcaggcgcagagacactgattaaaaacaagttgcatgtggaaaaatcaaaataaaaagtctggactctcacgctcgcttggtcctgtaactattttgtagaatggaagacatcaactttgcgtctctggccccgcgacacggctcgcgcccgttcatgggaaactggcaagatatcggcaccagcaatatgagcggtggcgccttcagctggggctcgctgtggagcggcattaaaaatttcggttccaccgttaagaactatggcagcaaggcctggaacagcagcacaggccagatgctgagggataagttgaaagagcaaaatttccaacaaaaggtggtagatggcctggcctctggcattagcggggtggtggacctggccaaccaggcagtgcaaaataagattaacagtaagcttgatccccgccctcccgtagaggagcctccaccggccgtggagacagtgtctccagaggggcgtggcgaaaagcgtccgcgccccgacagggaagaaactctggtgacgcaaatagacgagcctccctcgtacgaggaggcactaaagcaaggcctgcccaccacccgtcccatcgcgcccatggctaccggagtgctgggccagcacacacccgtaacgctggacctgcctccccccgccgacacccagcagaaacctgtgctgccaggcccgaccgccgttgttgtaacccgtcctagccgcgcgtccctgcgccgcgccgccagcggtccgcgatcgttgcggcccgtagccagtggcaactggcaaagcacactgaacagcatcgtgggtctgggggtgcaatccctgaagcgccgacgatgcttctgatagctaacgtgtcgtatgtgtgtcatgtatgcgtccatgtcgccgccagaggagctgctgagccgccgcgcgcccgctttccaagatggctaccccttcgatgatgccgcagtggtcttacatgcacatctcgggccaggacgcctcggagtacctgagccccgggctggtgcagtttgcccgcgccaccgagacgtacttcagcctgaataacaagtttagaaaccccacggtggcgcctacgcacgacgtgaccacagaccggtcccagcgtttgacgctgcggttcatccctgtggaccgtgaggatactgcgtactcgtacaaggcgcggttcaccctagctgtgggtgataaccgtgtgctggacatggcttccacgtactttgacatccgcggcgtgctggacaggggccctacttttaagccctactctggcactgcctacaacgccctggctcccaagggtgccccaaatccttgcgaatgggatgaagctgctactgctcttgaaataaacctagaagaagaggacgatgacaacgaagacgaagtagacgagcaagctgagcagcaaaaaactcacgtatttgggcaggcgccttattctggtataaatattacaaaggagggtattcaaataggtgtcgaaggtcaaacacctaaatatgccgataaaacatttcaacctgaacctcaaataggagaatctcagtggtacgaaacagaaattaatcatgcagctgggagagtcctaaaaaagactaccccaatgaaaccatgttacggttcatatgcaaaacccacaaatgaaaatggagggcaaggcattcttgtaaagcaacaaaatggaaagctagaaagtcaagtggaaatgcaatttttctcaactactgaggcagccgcaggcaatggtgataacttgactcctaaagtggtattgtacagtgaagatgtagatatagaaaccccagacactcatatttcttacatgcccactattaaggaaggtaactcacgagaactaatgggccaacaatctatgcccaacaggcctaattacattgcttttagggacaattttattggtctaatgtattacaacagcacgggtaatatgggtgttctggcgggccaagcatcgcagttgaatgctgttgtagatttgcaagacagaaacacagagctttcataccagcttttgcttgattccattggtgatagaaccaggtacttttctatgtggaatcaggctgttgacagctatgatccagatgttagaattattgaaaatcatggaactgaagatgaacttccaaattactgctttccactgggaggtgtgattaatacagagactcttaccaaggtaaaacctaaaacaggtcaggaaaatggatgggaaaaagatgctacagaattttcagataaaaatgaaataagagttggaaataattttgccatggaaatcaatctaaatgccaacctgtggagaaatttcctgtactccaacatagcgctgtatttgcccgacaagctaaagtacagtccttccaacgtaaaaatttctgataacccaaacacctacgactacatgaacaagcgagtggtggctcccgggctagtggactgctacattaaccttggagcacgctggtcccttgactatatggacaacgtcaacccatttaaccaccaccgcaatgctggcctgcgctaccgctcaatgttgctgggcaatggtcgctatgtgcccttccacatccaggtgcctcagaagttctttgccattaaaaacctccttctcctgccgggctcatacacctacgagtggaacttcaggaaggatgttaacatggttctgcagagctccctaggaaatgacctaagggttgacggagccagcattaagtttgatagcatttgcctttacgccaccttcttccccatggcccacaacaccgcctccacgcttgaggccatgcttagaaacgacaccaacgaccagtcctttaacgactatctctccgccgccaacatgctctaccctatacccgccaacgctaccaacgtgcccatatccatcccctcccgcaactgggcggctttccgcggctgggccttcacgcgccttaagactaaggaaaccccatcactgggctcgggctacgacccttattacacctactctggctctataccctacctagatggaaccttttacctcaaccacacctttaagaaggtggccattacctttgactcttctgtcagctggcctggcaatgaccgcctgcttacccccaacgagtttgaaattaagcgctcagttgacggggagggttacaacgttgcccagtgtaacatgaccaaagactggttcctggtacaaatgctagctaactataacattggctaccagggcttctatatcccagagagctacaaggaccgcatgtactccttctttagaaacttccagcccatgagccgtcaggtggtggatgatactaaatacaaggactaccaacaggtgggcatcctacaccaacacaacaactctggatttgttggctaccttgcccccaccatgcgcgaaggacaggcctaccctgctaacttcccctatccgcttataggcaagaccgcagttgacagcattacccagaaaaagtttctttgcgatcgcaccctttggcgcatcccattctccagtaactttatgtccatgggcgcactcacagacctgggccaaaaccttctctacgccaactccgcccacgcgctagacatgacttttgaggtggatcccatggacgagcccacccttctttatgttttgtttgaagtctttgacgtggtccgtgtgcaccagccgcaccgcggcgtcatcgaaaccgtgtacctgcgcacgcccttctcggccggcaacgccacaacataaagaagcaagcaacatcaacaacagctgccgccatgggctccagtgagcaggaactgaaagccattgtcaaagatcttggttgtgggccatattttttgggcacctatgacaagcgctttccaggctttgtttctccacacaagctcgcctgcgccatagtcaatacggccggtcgcgagactgggggcgtacactggatggcctttgcctggaacccgcactcaaaaacatgctacctctttgagccctttggcttttctgaccagcgactcaagcaggtttaccagtttgagtacgagtcactcctgcgccgtagcgccattgcttcttcccccgaccgctgtataacgctggaaaagtccacccaaagcgtacaggggcccaactcggccgcctgtggactattctgctgcatgtttctccacgcctttgccaactggccccaaactcccatggatcacaaccccaccatgaaccttattaccggggtacccaactccatgctcaacagtccccaggtacagcccaccctgcgtcgcaaccaggaacagctctacagcttcctggagcgccactcgccctacttccgcagccacagtgcgcagattaggagcgccacttctttttgtcacttgaaaaacatgtaaaaataatgtactagagacactttcaataaaggcaaatgcttttatttgtacactctcgggtgattatttacccccacccttgccgtctgcgccgtttaaaaatcaaaggggttctgccgcgcatcgctatgcgccactggcagggacacgttgcgatactggtgtttagtgctccacttaaactcaggcacaaccatccgcggcagctcggtgaagttttcactccacaggctgcgcaccatcaccaacgcgtttagcaggtcgggcgccgatatcttgaagtcgcagttggggcctccgccctgcgcgcgcgagttgcgatacacagggttgcagcactggaacactatcagcgccgggtggtgcacgctggccagcacgctcttgtcggagatcagatccgcgtccaggtcctccgcgttgctcagggcgaacggagtcaactttggtagctgccttcccaaaaagggcgcgtgcccaggctttgagttgcactcgcaccgtagtggcatcaaaaggtgaccgtgcccggtctgggcgttaggatacagcgcctgcataaaagccttgatctgcttaaaagccacctgagcctttgcgccttcagagaagaacatgccgcaagacttgccggaaaactgattggccggacaggccgcgtcgtgcacgcagcaccttgcgtcggtgttggagatctgcaccacatttcggccccaccggttcttcacgatcttggccttgctagactgctccttcagcgcgcgctgcccgttttcgctcgtcacatccatttcaatcacgtgctccttatttatcataatgcttccgtgtagacacttaagctcgccttcgatctcagcgcagcggtgcagccacaacgcgcagcccgtgggctcgtgatgcttgtaggtcacctctgcaaacgactgcaggtacgcctgcaggaatcgccccatcatcgtcacaaaggtcttgttgctggtgaaggtcagctgcaacccgcggtgctcctcgttcagccaggtcttgcatacggccgccagagcttccacttggtcaggcagtagtttgaagttcgcctttagatcgttatccacgtggtacttgtccatcagcgcgcgcgcagcctccatgcccttctcccacgcagacacgatcggcacactcagcgggttcatcaccgtaatttcactttccgcttcgctgggctcttcctcttcctcttgcgtccgcataccacgcgccactgggtcgtcttcattcagccgccgcactgtgcgcttacctcctttgccatgcttgattagcaccggtgggttgctgaaacccaccatttgtagcgccacatcttctctttcttcctcgctgtccacgattacctctggtgatggcgggcgctcgggcttgggagaagggcgcttctttttcttcttgggcgcaatggccaaatccgccgccgaggtcgatggccgcgggctgggtgtgcgcggcaccagcgcgtcttgtgatgagtcttcctcgtcctcggactcgatacgccgcctcatccgcttttttgggggcgcccggggaggcggcggcgacggggacggggacgacacgtcctccatggttgggggacgtcgcgccgcaccgcgtccgcgctcgggggtggtttcgcgctgctcctcttcccgactggccatttccttctcctataggcagaaaaagatcatggagtcagtcgagaagaaggacagcctaaccgccccctctgagttcgccaccaccgcctccaccgatgccgccaacgcgcctaccaccttccccgtcgaggcacccccgcttgaggaggaggaagtgattatcgagcaggacccaggttttgtaagcgaagacgacgaggaccgctcagtaccaacagaggataaaaagcaagaccaggacaacgcagaggcaaacgaggaacaagtcgggcggggggacgaaaggcatggcgactacctagatgtgggagacgacgtgctgttgaagcatctgcagcgccagtgcgccattatctgcgacgcgttgcaagagcgcagcgatgtgcccctcgccatagcggatgtcagccttgcctacgaacgccacctattctcaccgcgcgtaccccccaaacgccaagaaaacggcacatgcgagcccaacccgcgcctcaacttctaccccgtatttgccgtgccagaggtgcttgccacctatcacatctttttccaaaactgcaagatacccctatcctgccgtgccaaccgcagccgagcggacaagcagctggccttgcggcagggcgctgtcatacctgatatcgcctcgctcaacgaagtgccaaaaatctttgagggtcttggacgcgacgagaagcgcgcggcaaacgctctgcaacaggaaaacagcgaaaatgaaagtcactctggagtgttggtggaactcgagggtgacaacgcgcgcctagccgtactaaaacgcagcatcgaggtcacccactttgcctacccggcacttaacctaccccccaaggtcatgagcacagtcatgagtgagctgatcgtgcgccgtgcgcagcccctggagagggatgcaaatttgcaagaacaaacagaggagggcctacccgcagttggcgacgagcagctagcgcgctggcttcaaacgcgcgagcctgccgacttggaggagcgacgcaaactaatgatggccgcagtgctcgttaccgtggagcttgagtgcatgcagcggttctttgctgacccggagatgcagcgcaagctagaggaaacattgcactacacctttcgacagggctacgtacgccaggcctgcaagatctccaacgtggagctctgcaacctggtctcctaccttggaattttgcacgaaaaccgccttgggcaaaacgtgcttcattccacgctcaagggcgaggcgcgccgcgactacgtccgcgactgcgtttacttatttctatgctacacctggcagacggccatgggcgtttggcagcagtgcttggaggagtgcaacctcaaggagctgcagaaactgctaaagcaaaacttgaaggacctatggacggccttcaacgagcgctccgtggccgcgcacctggcggacatcattttccccgaacgcctgcttaaaaccctgcaacagggtctgccagacttcaccagtcaaagcatgttgcagaactttaggaactttatcctagagcgctcaggaatcttgcccgccacctgctgtgcacttcctagcgactttgtgcccattaagtaccgcgaatgccctccgccgctttggggccactgctaccttctgcagctagccaactaccttgcctaccactctgacataatggaagacgtgagcggtgacggtctactggagtgtcactgtcgctgcaacctatgcaccccgcaccgctccctggtttgcaattcgcagctgcttaacgaaagtcaaattatcggtacctttgagctgcagggtccctcgcctgacgaaaagtccgcggctccggggttgaaactcactccggggctgtggacgtcggcttaccttcgcaaatttgtacctgaggactaccacgcccacgagattaggttctacgaagaccaatcccgcccgcctaatgcggagcttaccgcctgcgtcattacccagggccacattcttggccaattgcaagccatcaacaaagcccgccaagagtttctgctacgaaagggacggggggtttacttggacccccagtccggcgaggagctcaacccaatccccccgccgccgcagccctatcagcagcagccgcgggcccttgcttcccaggatggcacccaaaaagaagctgcagctgccgccgccacccacggacgaggaggaatactgggacagtcaggcagaggaggttttggacgaggaggaggaggacatgatggaagactgggagagcctagacgaggaagcttccgaggtcgaagaggtgtcagacgaaacaccgtcaccctcggtcgcattcccctcgccggcgccccagaaatcggcaaccggttccagcatggctacaacctccgctcctcaggcgccgccggcactgcccgttcgccgacccaaccgtagatgggacaccactggaaccagggccggtaagtccaagcagccgccgccgttagcccaagagcaacaacagcgccaaggctaccgctcatggcgcgggcacaagaacgccatagttgcttgcttgcaagactgtgggggcaacatctccttcgcccgccgctttcttctctaccatcacggcgtggccttcccccgtaacatcctgcattactaccgtcatctctacagcccatactgcaccggcggcagcggcagcaacagcagcggccacacagaagcaaaggcgaccggatagcaagactctgacaaagcccaagaaatccacagcggcggcagcagcaggaggaggagcgctgcgtctggcgcccaacgaacccgtatcgacccgcgagcttagaaacaggatttttcccactctgtatgctatatttcaacagagcaggggccaagaacaagagctgaaaataaaaaacaggtctctgcgatccctcacccgcagctgcctgtatcacaaaagcgaagatcagcttcggcgcacgctggaagacgcggaggctctcttcagtaaatactgcgcgctgactcttaaggactagtttcgcgccctttctcaaatttaagcgcgaaaactacgtcatctccagcggccacacccggcgccagcacctgttgtcagcgccattatgagcaaggaaattcccacgccctacatgtggagttaccagccacaaatgggacttgcggctggagctgcccaagactactcaacccgaataaactacatgagcgcgggaccccacatgatatcccgggtcaacggaatacgcgcccaccgaaaccgaattctcctggaacaggcggctattaccaccacacctcgtaataaccttaatccccgtagttggcccgctgccctggtgtaccaggaaagtcccgctcccaccactgtggtacttcccagagacgcccaggccgaagttcagatgactaactcaggggcgcagcttgcgggcggctttcgtcacagggtgcggtcgcccgggcagggtataactcacctgacaatcagagggcgaggtattcagctcaacgacgagtcggtgagctcctcgcttggtctccgtccggacgggacatttcagatcggcggcgccggccgctcttcattcacgcctcgtcaggcaatcctaactctgcagacctcgtcctctgagccgcgctctggaggcattggaactctgcaatttattgaggagtttgtgccatcggtctactttaaccccttctcgggacctcccggccactatccggatcaatttattcctaactttgacgcggtaaaggactcggcggacggctacgactgaatgttaagtggagaggcagagcaactgcgcctgaaacacctggtccactgtcgccgccacaagtgctttgcccgcgactccggtgagttttgctactttgaattgcccgaggatcatatcgagggcccggcgcacggcgtccggcttaccgcccagggagagcttgcccgtagcctgattcgggagtttacccagcgccccctgctagttgagcgggacaggggaccctgtgttctcactgtgatttgcaactgtcctaaccctggattacatcaagatcctctagttaatgtcaggtcgcctaagtcgattaactagagtacccggggatcttattccctttaactaataaaaaaaaataataaagcatcacttacttaaaatcagttagcaaatttctgtccagtttattcagcagcacctccttgccctcctcccagctctggtattgcagcttcctcctggctgcaaactttctccacaatctaaatggaatgtcagtttcctcctgttcctgtccatccgcacccactatcttcatgttgttgcagatgaagcgcgcaagaccgtctgaagataccttcaaccccgtgtatccatatgacacggaaaccggtcctccaactgtgccttttcttactcctccctttgtatcccccaatgggtttcaagagagtccccctggggtactctctttgcgcctatccgaacctctagttacctccaatggcatgcttgcgctcaaaatgggcaacggcctctctctggacgaggccggcaaccttacctcccaaaatgtaaccactgtgagcccacctctcaaaaaaaccaagtcaaacataaacctggaaatatctgcacccctcacagttacctcagaagccctaactgtggctgccgccgcacctctaatggtcgcgggcaacacactcaccatgcaatcacaggccccgctaaccgtgcacgactccaaacttagcattgccacccaaggacccctcacagtgtcagaaggaaagctagccctgcaaacatcaggccccctcaccaccaccgatagcagtacccttactatcactgcctcaccccctctaactactgccactggtagcttgggcattgacttgaaagagcccatttatacacaaaatggaaaactaggactaaagtacggggctcctttgcatgtaacagacgacctaaacactttgaccgtagcaactggtccaggtgtgactattaataatacttccttgcaaactaaagttactggagccttgggttttgattcacaaggcaatatgcaacttaatgtagcaggaggactaaggattgattctcaaaacagacgccttatacttgatgttagttatccgtttgatgctcaaaaccaactaaatctaagactaggacagggccctctttttataaactcagcccacaacttggatattaactacaacaaaggcctttacttgtttacagcttcaaacaattccaaaaagcttgaggttaacctaagcactgccaaggggttgatgtttgacgctacagccatagccattaatgcaggagatgggcttgaatttggttcacctaatgcaccaaacacaaatcccctcaaaacaaaaattggccatggcctagaatttgattcaaacaaggctatggttcctaaactaggaactggccttagttttgacagcacaggtgccattacagtaggaaacaaaaataatgataagctaactttgtggaccggaataaaccctccacctaactgtcaaattgtggaaaacactaatacaaatgatggcaaacttactttagtattagtaaaaaatggagggcttgttaatggctacgtgtctctagttggtgtatcagacactgtgaaccaaatgttcacacaaaagacagcaaacatccaattaagattatattttgactcttctggaaatctattaactgaggaatcagacttaaaaattccacttaaaaataaatcttctacagcgaccagtgaaactgtagccagcagcaaagcctttatgccaagtactacagcttatcccttcaacaccactactagggatagtgaaaactacattcatggaatatgttactacatgactagttatgatagaagtctatttcccttgaacatttctataatgctaaacagccgtatgatttcttccaatgttgcctatgccatacaatttgaatggaatctaaatgcaagtgaatctccagaaagcaacatagctacgctgaccacatccccctttttcttttcttacattacagaagacgacaactaaagaatcgtttgtgttatgtttcaacgtgtttatttttcaattgcagaaaatttcaagtcatttttcattcagtagtatagccccaccaccacatagcttatacagatcaccgtaccttaatcaaactcacagaaccctagtattcaacctgccacctccctcccaacacacagagtacacagtcctttctccccggctggccttaaaaagcatcatatcatgggtaacagacatattcttaggtgttatattccacacggtttcctgtcgagccaaacgctcatcagtgatattaataaactccccgggcagctcacttaagttcatgtcgctgtccagctgctgagccacaggctgctgtccaacttgcggttgcttaacgggcggcgaaggagaagtccacgctcagtcataatcgtgcatcaggatagggcggtggtgctgcagcagcgcgcgaataaactgctgccgccgccgctccgtcctgcaggaatacaacatggcagtggtctcctcagcgatgattcgcaccgcccgcagcataaggcgccttgtcctccgggcacagcagcgcaccctgatctcacttaaatcagcacagtaactgcagcacagcaccacaatattgttcaaaatcccacagtgcaaggcgctgtatccaaagctcatggcggggaccacagaacccacgtggccatcataccacaagcgcaggtagattaagtggcgacccctcataaacacgctggacataaacattacctcttttggcatgttgtaattcaccacctcccggtaccatataaacctctgattaaacatggcgccatccaccaccatcctaaaccagctggccaaaacctgcccgccggctatacactgcagggaaccgggactggaacaatgacagtggagagcccaggactcgtaaccatggatcatcatgctcgtcatgatatcaatgttggcacaacacaggcacacgtgcatacacttcctcaggattacaagctcctcccgcgttagaaccatatcccagggaacaacccattcctgaatcagcgtaaatcccacactgcagggaagacctcgcacgtaactcacgttgtgcattgtcaaagtgttacattcgggcagcagcggatgatcctccagtatggtagcgcgggtttctgtctcaaaaggaggtagacgatccctactgtacggagtgcgccgagacaaccgagatcgtgttggtcgtagtgtcatgccaaatggaacgccggacgtagtcatatttcctgaagcaaaaccaggtgcgggcgtgacaaacagatctgcgtctccggtctcgccgcttagatcgctctgtgtagtagttgtagtatatccactctctcaaagcatccaggcgccccctggcttcgggttctatgtaaactccttcatgcgccgctgccctgataacatccaccaccgcagaataagccacacccagccaacctacacattcgttctgcgagtcacacacgggaggagcgggaagagctggaagaaccatgtttttttttttattccaaaagattatccaaaacctcaaaatgaagatctattaagtgaacgcgctcccctccggtggcgtggtcaaactctacagccaaagaacagataatggcatttgtaagatgttgcacaatggcttccaaaaggcaaacggccctcacgtccaagtggacgtaaaggctaaacccttcagggtgaatctcctctataaacattccagcaccttcaaccatgcccaaataattctcatctcgccaccttctcaatatatctctaagcaaatcccgaatattaagtccggccattgtaaaaatctgctccagagcgccctccaccttcagcctcaagcagcgaatcatgattgcaaaaattcaggttcctcacagacctgtataagattcaaaagcggaacattaacaaaaataccgcgatcccgtaggtcccttcgcagggccagctgaacataatcgtgcaggtctgcacggaccagcgcggccacttccccgccaggaaccatgacaaaagaacccacactgattatgacacgcatactcggagctatgctaaccagcgtagccccgatgtaagcttgttgcatgggcggcgatataaaatgcaaggtgctgctcaaaaaatcaggcaaagcctcgcgcaaaaaagaaagcacatcgtagtcatgctcatgcagataaaggcaggtaagctccggaaccaccacagaaaaagacaccatttttctctcaaacatgtctgcgggtttctgcataaacacaaaataaaataacaaaaaaacatttaaacattagaagcctgtcttacaacaggaaaaacaacccttataagcataagacggactacggccatgccggcgtgaccgtaaaaaaactggtcaccgtgattaaaaagcaccaccgacagctcctcggtcatgtccggagtcataatgtaagactcggtaaacacatcaggttgattcacatcggtcagtgctaaaaagcgaccgaaatagcccgggggaatacatacccgcaggcgtagagacaacattacagcccccataggaggtataacaaaattaataggagagaaaaacacataaacacctgaaaaaccctcctgcctaggcaaaatagcaccctcccgctccagaacaacatacagcgcttccacagcggcagccataacagtcagccttaccagtaaaaaagaaaacctattaaaaaaacaccactcgacacggcaccagctcaatcagtcacagtgtaaaaaagggccaagtgcagagcgagtatatataggactaaaaaatgacgtaacggttaaagtccacaaaaaacacccagaaaaccgcacgcgaacctacgcccagaaacgaaagccaaaaaacccacaacttcctcaaatcgtcacttccgttttcccacgttacgtcacttcccattttaagaaaactacaattcccaacacatacaagttactccgccctaaaacctacgtcacccgccccgttcccacgccccgcgccacgtcacaaactccaccccctcattatcatattggcttcaatccaaaataaggtatattattgatgatg

SEQ ID NO: 35 - DNA, 36410 bp, Artificial Sequence
  Adk35F2-Spike/E4orf6(mPGK)-E4dl-27(E4re#33)
ttaattaacatcatcaataatataccttattttggattgaagccaatatgataatgagggggtggagtttgtgacgtggcgcggggcgtgggaacggggcgggtgacgtagtagtgtggcggaagtgtgatgttgcaagtgtggcggaacacatgtaagcgacggatgtggcaaaagtgacgtttttggtgtgcgccggtgtacacaggaagtgacaattttcgcgcggttttaggcggatgttgtagtaaatttgggcgtaaccgagtaagatttggccattttcgcgggaaaactgaataagaggaagtgaaatctgaataattttgtgttactcatagcgcgtaataatttctgtaatagtaatcaattacggggtcattagttcatagcccatatatggagttccgcgttacataacttacggtaaatggcccgcctggctgaccgcccaacgacccccgcccattgacgtcaataatgacgtatgttcccatagtaacgccaatagggactttccattgacgtcaatgggtggagtatttacggtaaactgcccacttggcagtacatcaagtgtatcatatgccaagtacgccccctattgacgtcaatgacggtaaatggcccgcctggcattatgcccagtacatgaccttatgggactttcctacttggcagtacatctacgtattagtcatcgctattaccatggtgatgcggttttggcagtacatcaatgggcgtggatagcggtttgactcacggggatttccaagtctccaccccattgacgtcaatgggagtttgttttggcaccaaaatcaacgggactttccaaaatgtcgtaacaactccgccccattgacgcaaatgggcggtaggcgtgtacggtgggaggtctatataagcagagctctccctatcagtgatagagatctccctatcagtgatagagatcgtcgacgagctcgtttagtgaaccgtcagatcgcctggagacgccatccacgctgttttgacctccatagaagacaccgggaccgatccagcctccgatttgccaccatgtttgtgttcctggtgctgctgccactggtgtccagccagtgtgtgaacctgaccaccaggacccaacttcctcctgcctacaccaactccttcaccaggggagtctactaccctgacaaggtgttcaggtcctctgtgctgcacagcacccaggacctgttcctgccattcttcagcaatgtgacctggttccatgccatccatgtgtctggcaccaatggcaccaagaggtttgacaaccctgtgctgccattcaatgatggagtctactttgccagcacagagaagagcaacatcatcaggggctggatttttggcaccaccctggacagcaagacccagtccctgctgattgtgaacaatgccaccaatgtggtgattaaggtgtgtgagttccagttctgtaatgacccattcctgggagtctactaccacaagaacaacaagtcctggatggagtctgagttcagggtctactcctctgccaacaactgtacctttgaatatgtgagccaaccattcctgatggacttggagggcaagcagggcaacttcaagaacctgagggagtttgtgttcaagaacattgatggctacttcaagatttacagcaaacacacaccaatcaacctggtgagggacctgccacagggcttctctgccttggaaccactggtggacctgccaattggcatcaacatcaccaggttccagaccctgctggctctgcacaggtcctacctgacacctggagactcctcctctggctggacagcaggagcagcagcctactatgtgggctacctccaaccaaggaccttcctgctgaaatacaatgagaatggcaccatcacagatgctgtggactgtgccctggacccactgtctgagaccaagtgtaccctgaaatccttcacagtggagaagggcatctaccagaccagcaacttcagggtccaaccaacagagagcattgtgaggtttccaaacatcaccaacctgtgtccatttggagaggtgttcaatgccaccaggtttgcctctgtctatgcctggaacaggaagaggattagcaactgtgtggctgactactctgtgctctacaactctgcctccttcagcaccttcaagtgttatggagtgagcccaaccaaactgaatgacctgtgtttcaccaatgtctatgctgactcctttgtgattaggggagatgaggtgagacagattgcccctggacaaacaggcaagattgctgactacaactacaaactgcctgatgacttcacaggctgtgtgattgcctggaacagcaacaacctggacagcaaggtgggaggcaactacaactacctctacagactgttcaggaagagcaacctgaaaccatttgagagggacatcagcacagagatttaccaggctggcagcacaccatgtaatggagtggagggcttcaactgttactttccactccaatcctatggcttccaaccaaccaatggagtgggctaccaaccatacagggtggtggtgctgtcctttgaactgctccatgcccctgccacagtgtgtggaccaaagaagagcaccaacctggtgaagaacaagtgtgtgaacttcaacttcaatggactgacaggcacaggagtgctgacagagagcaacaagaagttcctgccattccaacagtttggcagggacattgctgacaccacagatgctgtgagggacccacagaccttggagattctggacatcacaccatgttcctttggaggagtgtctgtgattacacctggcaccaacaccagcaaccaggtggctgtgctctaccaggatgtgaactgtactgaggtgcctgtggctatccatgctgaccaacttacaccaacctggagggtctacagcacaggcagcaatgtgttccagaccagggctggctgtctgattggagcagagcatgtgaacaactcctatgagtgtgacatcccaattggagcaggcatctgtgcctcctaccagacccagaccggtggcggtgggtcgaggtctgtggcaagccagagcatcattgcctacacaatgagtctgggagcagagaactctgtggcttacagcaacaacagcattgccatcccaaccaacttcaccatctctgtgaccacagagattctgcctgtgagtatgaccaagacctctgtggactgtacaatgtatatctgtggagacagcacagagtgtagcaacctgctgctccaatatggctccttctgtacccaacttaacagggctctgacaggcattgctgtggaacaggacaagaacacccaggaggtgtttgcccaggtgaagcagatttacaagacacctccaatcaaggactttggaggcttcaacttcagccagattctgcctgacccaagcaagccaagcaagaggtccttcattgaggacctgctgttcaacaaggtgaccctggctgatgctggcttcatcaagcaatatggagactgtctgggagacattgctgccagggacctgatttgtgcccagaagttcaatggactgacagtgctgcctccactgctgacagatgagatgattgcccaatacacctctgccctgctggctggcaccatcacctctggctggacctttggagcaggagcagccctccaaatcccatttgctatgcagatggcttacaggttcaatggcattggagtgacccagaatgtgctctatgagaaccagaaactgattgccaaccagttcaactctgccattggcaagattcaggactccctgtccagcacagcctctgccctgggcaaactccaagatgtggtgaaccagaatgcccaggctctgaacaccctggtgaagcaactttccagcaactttggagccatctcctctgtgctgaatgacatcctgagcagactggacaaggtggaggctgaggtccagattgacagactgattacaggcagactccaatccctccaaacctatgtgacccaacaacttatcagggctgctgagattagggcatctgccaacctggctgccaccaagatgagtgagtgtgtgctgggacaaagcaagagggtggacttctgtggcaagggctaccacctgatgagttttccacagtctgcccctcatggagtggtgttcctgcatgtgacctatgtgcctgcccaggagaagaacttcaccacagcccctgccatctgccatgatggcaaggctcactttccaagggagggagtgtttgtgagcaatggcacccactggtttgtgacccagaggaacttctatgaaccacagattatcaccacagacaacacctttgtgtctggcaactgtgatgtggtgattggcattgtgaacaacacagtctatgacccactccaacctgaactggactccttcaaggaggaactggacaaatacttcaagaaccacaccagccctgatgtggacctgggagacatctctggcatcaatgcctctgtggtgaacatccagaaggagattgacagactgaatgaggtggctaagaacctgaatgagtccctgattgacctccaagaactgggcaaatatgaacaatacatcaagtggccatgaaaattgatcataatcagccataccacatttgtagaggttttacttgctttaaaaaacctcccacacctccccctgaacctgaaacataaaatgaatgcaattgttgttgttaacttgtttattgcagcttataatggttacaaataaagcaatagcatcacaaatttcacaaataaagcatttttttcactgcattctagttgtggtttgtccaaactcatcaatgtatcttaacgcggatcgggtaggggaggcgcttttcccaaggcagtctggagcatgcgctttagcagccccgctgggcacttggcgctacacaagtggcctctggcctcgcacacattccacatccaccggtaggcgccaaccggctccgttctttggtggccccttcgcgccaccttctactcctcccctagtcaggaagttcccccccgccccgcagctcgcgtcgtgcaggacgtgacaaatggaagtagcacgtctcactagtctcgtgcagatggacagcaccgctgagcaatggaagcgggtaggcctttggggcagcggccaatagcagctttgctccttcgctttctgggctcagaggctgggaaggggtgggtccgggggcgggctcaggggcgggctcaggggcggggcgggcgcccgaaggtcctccggaggcccggcattctgcacgcttcaaaagcgcacgtctgccgcgctgttctcctcttcctcatctccgggcctttcgaaactaccccaagctggccaccatgactacgtccggcgttccatttggcatgacactacgaccaacacgatctcggttgtctcggcgcactccgtacagtagggatcgtctacctccttttgagacagaaacccgcgctaccatactggaggatcatccgctgctgcccgaatgtaacactttgacaatgcacaacgtgagttacgtgcgaggtcttccctgcagtgtgggatttacgctgattcaggaatgggttgttccctgggatatggttctaacgcgggaggagcttgtaatcctgaggaagtgtatgcacgtgtgcctgtgttgtgccaacattgatatcatgacgagcatgatgatccatggttacgagtcctgggctctccactgtcattgttccagtcccggttccctgcagtgtatagccggcgggcaggttttggccagctggtttaggatggtggtggatggcgccatgtttaatcagaggtttatatggtaccgggaggtggtgaattacaacatgccaaaagaggtaatgtttatgtccagcgtgtttatgaggggtcgccacttaatctacctgcgcttgtggtatgatggccacgtgggttctgtggtccccgccatgagctttggatacagcgccttgcactgtgggattttgaacaatattgtggtgctgtgctgcagttactgtgctgatttaagtgagatcagggtgcgctgctgtgcccggaggacaaggcgccttatgctgcgggcggtgcgaatcatcgctgaggagaccactgccatgttgtattcctgcaggacggagcggcggcggcagcagtttattcgcgcgctgctgcagcaccaccgccctatcctgatgcacgattatgactctacccccatgtagaagcttggggatcaattctctagagctcgctgatcagcctcgactgtgccttctagttgccagccatctgttgtttgcccctcccccgtgccttccttgaccctggaaggtgccactcccactgtcctttcctaataaaatgaggaaattgcatcgcattgtctgagtaggtgtcattctattctggggggtggggtggggcaggacagcaagggggaggattgggaagacaatagcaggcatgctggggatgcggtgggctctatggcttctgaggaaattgggcgtggcttaagggtgggaaagaatatataaggtgggggtcttatgtagttttgtatctgttttgcagcagccgccgccgccatgagcaccaactcgtttgatggaagcattgtgagctcatatttgacaacgcgcatgcccccatgggccggggtgcgtcagaatgtgatgggctccagcattgatggtcgccccgtcctgcccgcaaactctactaccttgacctacgagaccgtgtctggaacgccgttggagactgcagcctccgccgccgcttcagccgctgcagccaccgcccgcgggattgtgactgactttgctttcctgagcccgcttgcaagcagtgcagcttcccgttcatccgcccgcgatgacaagttgacggctcttttggcacaattggattctttgacccgggaacttaatgtcgtttctcagcagctgttggatctgcgccagcaggtttctgccctgaaggcttcctcccctcccaatgcggtttaaaacataaataaaaaaccagactctgtttggatttggatcaagcaagtgtcttgctgtctttatttaggggttttgcgcgcgcggtaggcccgggaccagcggtctcggtcgttgagggtcctgtgtattttttccaggacgtggtaaaggtgactctggatgttcagatacatgggcataagcccgtctctggggtggaggtagcaccactgcagagcttcatgctgcggggtggtgttgtagatgatccagtcgtagcaggagcgctgggcgtggtgcctaaaaatgtctttcagtagcaagctgattgccaggggcaggcccttggtgtaagtgtttacaaagcggttaagctgggatgggtgcatacgtggggatatgagatgcatcttggactgtatttttaggttggctatgttcccagccatatccctccggggattcatgttgtgcagaaccaccagcacagtgtatccggtgcacttgggaaatttgtcatgtagcttagaaggaaatgcgtggaagaacttggagacgcccttgtgacctccaagattttccatgcattcgtccataatgatggcaatgggcccacgggcggcggcctgggcgaagatatttctgggatcactaacgtcatagttgtgttccaggatgagatcgtcataggccatttttacaaagcgcgggcggagggtgccagactgcggtataatggttccatccggcccaggggcgtagttaccctcacagatttgcatttcccacgctttgagttcagatggggggatcatgtctacctgcggggcgatgaagaaaacggtttccggggtaggggagatcagctgggaagaaagcaggttcctgagcagctgcgacttaccgcagccggtgggcccgtaaatcacacctattaccggctgcaactggtagttaagagagctgcagctgccgtcatccctgagcaggggggccacttcgttaagcatgtccctgactcgcatgttttccctgaccaaatccgccagaaggcgctcgccgcccagcgatagcagttcttgcaaggaagcaaagtttttcaacggtttgagaccgtccgccgtaggcatgcttttgagcgtttgaccaagcagttccaggcggtcccacagctcggtcacctgctctacggcatctcgatccagcatatctcctcgtttcgcgggttggggcggctttcgctgtacggcagtagtcggtgctcgtccagacgggccagggtcatgtctttccacgggcgcagggtcctcgtcagcgtagtctgggtcacggtgaaggggtgcgctccgggctgcgcgctggccagggtgcgcttgaggctggtcctgctggtgctgaagcgctgccggtcttcgccctgcgcgtcggccaggtagcatttgaccatggtgtcatagtccagcccctccgcggcgtggcccttggcgcgcagcttgcccttggaggaggcgccgcacgaggggcagtgcagacttttgagggcgtagagcttgggcgcgagaaataccgattccggggagtaggcatccgcgccgcaggccccgcagacggtctcgcattccacgagccaggtgagctctggccgttcggggtcaaaaaccaggtttcccccatgctttttgatgcgtttcttacctctggtttccatgagccggtgtccacgctcggtgacgaaaaggctgtccgtgtccccgtatacagacttgagaggcctgtcctcgagcggtgttccgcggtcctcctcgtatagaaactcggaccactctgagacaaaggctcgcgtccaggccagcacgaaggaggctaagtgggaggggtagcggtcgttgtccactagggggtccactcgctccagggtgtgaagacacatgtcgccctcttcggcatcaaggaaggtgattggtttgtaggtgtaggccacgtgaccgggtgttcctgaaggggggctataaaagggggtgggggcgcgttcgtcctcactctcttccgcatcgctgtctgcgagggccagctgttggggtgagtactccctctgaaaagcgggcatgacttctgcgctaagattgtcagtttccaaaaacgaggaggatttgatattcacctggcccgcggtgatgcctttgagggtggccgcatccatctggtcagaaaagacaatctttttgttgtcaagcttggtggcaaacgacccgtagagggcgttggacagcaacttggcgatggagcgcagggtttggtttttgtcgcgatcggcgcgctccttggccgcgatgtttagctgcacgtattcgcgcgcaacgcaccgccattcgggaaagacggtggtgcgctcgtcgggcaccaggtgcacgcgccaaccgcggttgtgcagggtgacaaggtcaacgctggtggctacctctccgcgtaggcgctcgttggtccagcagaggcggccgcccttgcgcgagcagaatggcggtagggggtctagctgcgtctcgtccggggggtctgcgtccacggtaaagaccccgggcagcaggcgcgcgtcgaagtagtctatcttgcatccttgcaagtctagcgcctgctgccatgcgcgggcggcaagcgcgcgctcgtatgggttgagtgggggaccccatggcatggggtgggtgagcgcggaggcgtacatgccgcaaatgtcgtaaacgtagaggggctctctgagtattccaagatatgtagggtagcatcttccaccgcggatgctggcgcgcacgtaatcgtatagttcgtgcgagggagcgaggaggtcgggaccgaggttgctacgggcgggctgctctgctcggaagactatctgcctgaagatggcatgtgagttggatgatatggttggacgctggaagacgttgaagctggcgtctgtgagacctaccgcgtcacgcacgaaggaggcgtaggagtcgcgcagcttgttgaccagctcggcggtgacctgcacgtctagggcgcagtagtccagggtttccttgatgatgtcatacttatcctgtcccttttttttccacagctcgcggttgaggacaaactcttcgcggtctttccagtactcttggatcggaaacccgtcggcctccgaacggtaagagcctagcatgtagaactggttgacggcctggtaggcgcagcatcccttttctacgggtagcgcgtatgcctgcgcggccttccggagcgaggtgtgggtgagcgcaaaggtgtccctgaccatgactttgaggtactggtatttgaagtcagtgtcgtcgcatccgccctgctcccagagcaaaaagtccgtgcgctttttggaacgcggatttggcagggcgaaggtgacatcgttgaagagtatctttcccgcgcgaggcataaagttgcgtgtgatgcggaagggtcccggcacctcggaacggttgttaattacctgggcggcgagcacgatctcgtcaaagccgttgatgttgtggcccacaatgtaaagttccaagaagcgcgggatgcccttgatggaaggcaattttttaagttcctcgtaggtgagctcttcaggggagctgagcccgtgctctgaaagggcccagtctgcaagatgagggttggaagcgacgaatgagctccacaggtcacgggccattagcatttgcaggtggtcgcgaaaggtcctaaactggcgacctatggccattttttctggggtgatgcagtagaaggtaagcgggtcttgttcccagcggtcccatccaaggttcgcggctaggtctcgcgcggcagtcactagaggctcatctccgccgaacttcatgaccagcatgaagggcacgagctgcttcccaaaggcccccatccaagtataggtctctacatcgtaggtgacaaagagacgctcggtgcgaggatgcgagccgatcgggaagaactggatctcccgccaccaattggaggagtggctattgatgtggtgaaagtagaagtccctgcgacgggccgaacactcgtgctggcttttgtaaaaacgtgcgcagtactggcagcggtgcacgggctgtacatcctgcacgaggttgacctgacgaccgcgcacaaggaagcagagtgggaatttgagcccctcgcctggcgggtttggctggtggtcttctacttcggctgcttgtccttgaccgtctggctgctcgaggggagttacggtggatcggaccaccacgccgcgcgagcccaaagtccagatgtccgcgcgcggcggtcggagcttgatgacaacatcgcgcagatgggagctgtccatggtctggagctcccgcggcgtcaggtcaggcgggagctcctgcaggtttacctcgcatagacgggtcagggcgcgggctagatccaggtgatacctaatttccaggggctggttggtggcggcgtcgatggcttgcaagaggccgcatccccgcggcgcgactacggtaccgcgcggcgggcggtgggccgcgggggtgtccttggatgatgcatctaaaagcggtgacgcgggcgagcccccggaggtagggggggctccggacccgccgggagagggggcaggggcacgtcggcgccgcgcgcgggcaggagctggtgctgcgcgcgtaggttgctggcgaacgcgacgacgcggcggttgatctcctgaatctggcgcctctgcgtgaagacgacgggcccggtgagcttgaacctgaaagagagttcgacagaatcaatttcggtgtcgttgacggcggcctggcgcaaaatctcctgcacgtctcctgagttgtcttgataggcgatctcggccatgaactgctcgatctcttcctcctggagatctccgcgtccggctcgctccacggtggcggcgaggtcgttggaaatgcgggccatgagctgcgagaaggcgttgaggcctccctcgttccagacgcggctgtagaccacgcccccttcggcatcgcgggcgcgcatgaccacctgcgcgagattgagctccacgtgccgggcgaagacggcgtagtttcgcaggcgctgaaagaggtagttgagggtggtggcggtgtgttctgccacgaagaagtacataacccagcgtcgcaacgtggattcgttgatatcccccaaggcctcaaggcgctccatggcctcgtagaagtccacggcgaagttgaaaaactgggagttgcgcgccgacacggttaactcctcctccagaagacggatgagctcggcgacagtgtcgcgcacctcgcgctcaaaggctacaggggcctcttcttcttcttcaatctcctcttccataagggcctccccttcttcttcttctggcggcggtgggggaggggggacacggcggcgacgacggcgcaccgggaggcggtcgacaaagcgctcgatcatctccccgcggcgacggcgcatggtctcggtgacggcgcggccgttctcgcgggggcgcagttggaagacgccgcccgtcatgtcccggttatgggttggcggggggctgccatgcggcagggatacggcgctaacgatgcatctcaacaattgttgtgtaggtactccgccgccgagggacctgagcgagtccgcatcgaccggatcggaaaacctctcgagaaaggcgtctaaccagtcacagtcgcaaggtaggctgagcaccgtggcgggcggcagcgggcggcggtcggggttgtttctggcggaggtgctgctgatgatgtaattaaagtaggcggtcttgagacggcggatggtcgacagaagcaccatgtccttgggtccggcctgctgaatgcgcaggcggtcggccatgccccaggcttcgttttgacatcggcgcaggtctttgtagtagtcttgcatgagcctttctaccggcacttcttcttctccttcctcttgtcctgcatctcttgcatctatcgctgcggcggcggcggagtttggccgtaggtggcgccctcttcctcccatgcgtgtgaccccgaagcccctcatcggctgaagcagggctaggtcggcgacaacgcgctcggctaatatggcctgctgcacctgcgtgagggtagactggaagtcatccatgtccacaaagcggtggtatgcgcccgtgttgatggtgtaagtgcagttggccataacggaccagttaacggtctggtgacccggctgcgagagctcggtgtacctgagacgcgagtaagccctcgagtcaaatacgtagtcgttgcaagtccgcaccaggtactggtatcccaccaaaaagtgcggcggcggctggcggtagaggggccagcgtagggtggccggggctccgggggcgagatcttccaacataaggcgatgatatccgtagatgtacctggacatccaggtgatgccggcggcggtggtggaggcgcgcggaaagtcgcggacgcggttccagatgttgcgcagcggcaaaaagtgctccatggtcgggacgctctggccggtcaggcgcgcgcaatcgttgacgctctagcgtgcaaaaggagagcctgtaagcgggcactcttccgtggtctggtggataaattcgcaagggtatcatggcggacgaccggggttcgagccccgtatccggccgtccgccgtgatccatgcggttaccgcccgcgtgtcgaacccaggtgtgcgacgtcagacaacgggggagtgctccttttggcttccttccaggcgcggcggctgctgcgctagcttttttggccactggccgcgcgcagcgtaagcggttaggctggaaagcgaaagcattaagtggctcgctccctgtagccggagggttattttccaagggttgagtcgcgggacccccggttcgagtctcggaccggccggactgcggcgaacgggggtttgcctccccgtcatgcaagaccccgcttgcaaattcctccggaaacagggacgagccccttttttgcttttcccagatgcatccggtgctgcggcagatgcgcccccctcctcagcagcggcaagagcaagagcagcggcagacatgcagggcaccctcccctcctcctaccgcgtcaggaggggcgacatccgcggttgacgcggcagcagatggtgattacgaacccccgcggcgccgggcccggcactacctggacttggaggagggcgagggcctggcgcggctaggagcgccctctcctgagcggcacccaagggtgcagctgaagcgtgatacgcgtgaggcgtacgtgccgcggcagaacctgtttcgcgaccgcgagggagaggagcccgaggagatgcgggatcgaaagttccacgcagggcgcgagctgcggcatggcctgaatcgcgagcggttgctgcgcgaggaggactttgagcccgacgcgcgaaccgggattagtcccgcgcgcgcacacgtggcggccgccgacctggtaaccgcatacgagcagacggtgaaccaggagattaactttcaaaaaagctttaacaaccacgtgcgtacgcttgtggcgcgcgaggaggtggctataggactgatgcatctgtgggactttgtaagcgcgctggagcaaaacccaaatagcaagccgctcatggcgcagctgttccttatagtgcagcacagcagggacaacgaggcattcagggatgcgctgctaaacatagtagagcccgagggccgctggctgctcgatttgataaacatcctgcagagcatagtggtgcaggagcgcagcttgagcctggctgacaaggtggccgccatcaactattccatgcttagcctgggcaagttttacgcccgcaagatataccataccccttacgttcccatagacaaggaggtaaagatcgaggggttctacatgcgcatggcgctgaaggtgcttaccttgagcgacgacctgggcgtttatcgcaacgagcgcatccacaaggccgtgagcgtgagccggcggcgcgagctcagcgaccgcgagctgatgcacagcctgcaaagggccctggctggcacgggcagcggcgatagagaggccgagtcctactttgacgcgggcgctgacctgcgctgggccccaagccgacgcgccctggaggcagctggggccggacctgggctggcggtggcacccgcgcgcgctggcaacgtcggcggcgtggaggaatatgacgaggacgatgagtacgagccagaggacggcgagtactaagcggtgatgtttctgatcagatgatgcaagacgcaacggacccggcggtgcgggcggcgctgcagagccagccgtccggccttaactccacggacgactggcgccaggtcatggaccgcatcatgtcgctgactgcgcgcaatcctgacgcgttccggcagcagccgcaggccaaccggctctccgcaattctggaagcggtggtcccggcgcgcgcaaaccccacgcacgagaaggtgctggcgatcgtaaacgcgctggccgaaaacagggccatccggcccgacgaggccggcctggtctacgacgcgctgcttcagcgcgtggctcgttacaacagcggcaacgtgcagaccaacctggaccggctggtgggggatgtgcgcgaggccgtggcgcagcgtgagcgcgcgcagcagcagggcaacctgggctccatggttgcactaaacgccttcctgagtacacagcccgccaacgtgccgcggggacaggaggactacaccaactttgtgagcgcactgcggctaatggtgactgagacaccgcaaagtgaggtgtaccagtctgggccagactattttttccagaccagtagacaaggcctgcagaccgtaaacctgagccaggctttcaaaaacttgcaggggctgtggggggtgcgggctcccacaggcgaccgcgcgaccgtgtctagcttgctgacgcccaactcgcgcctgttgctgctgctaatagcgcccttcacggacagtggcagcgtgtcccgggacacatacctaggtcacttgctgacactgtaccgcgaggccataggtcaggcgcatgtggacgagcatactttccaggagattacaagtgtcagccgcgcgctggggcaggaggacacgggcagcctggaggcaaccctaaactacctgctgaccaaccggcggcagaagatcccctcgttgcacagtttaaacagcgaggaggagcgcattttgcgctacgtgcagcagagcgtgagccttaacctgatgcgcgacggggtaacgcccagcgtggcgctggacatgaccgcgcgcaacatggaaccgggcatgtatgcctcaaaccggccgtttatcaaccgcctaatggactacttgcatcgcgcggccgccgtgaaccccgagtatttcaccaatgccatcttgaacccgcactggctaccgccccctggtttctacaccgggggattcgaggtgcccgagggtaacgatggattcctctgggacgacatagacgacagcgtgttttccccgcaaccgcagaccctgctagagttgcaacagcgcgagcaggcagaggcggcgctgcgaaaggaaagcttccgcaggccaagcagcttgtccgatctaggcgctgcggccccgcggtcagatgctagtagcccatttccaagcttgatagggtctcttaccagcactcgcaccacccgcccgcgcctgctgggcgaggaggagtacctaaacaactcgctgctgcagccgcagcgcgaaaaaaacctgcctccggcatttcccaacaacgggatagagagcctagtggacaagatgagtagatggaagacgtacgcgcaggagcacagggacgtgccaggcccgcgcccgcccacccgtcgtcaaaggcacgaccgtcagcggggtctggtgtgggaggacgatgactcggcagacgacagcagcgtcctggatttgggagggagtggcaacccgtttgcgcaccttcgccccaggctggggagaatgttttaaaaaaaaaaaagcatgatgcaaaataaaaaactcaccaaggccatggcaccgagcgttggttttcttgtattccccttagtatgcggcgcgcggcgatgtatgaggaaggtcctcctccctcctacgagagtgtggtgagcgcggcgccagtggcggcggcgctgggttctcccttcgatgctcccctggacccgccgtttgtgcctccgcggtacctgcggcctaccggggggagaaacagcatccgttactctgagttggcacccctattcgacaccacccgtgtgtacctggtggacaacaagtcaacggatgtggcatccctgaactaccagaacgaccacagcaactttctgaccacggtcattcaaaacaatgactacagcccgggggaggcaagcacacagaccatcaatcttgacgaccggtcgcactggggcggcgacctgaaaaccatcctgcataccaacatgccaaatgtgaacgagttcatgtttaccaataagtttaaggcgcgggtgatggtgtcgcgcttgcctactaaggacaatcaggtggagctgaaatacgagtgggtggagttcacgctgcccgagggcaactactccgagaccatgaccatagaccttatgaacaacgcgatcgtggagcactacttgaaagtgggcagacagaacggggttctggaaagcgacatcggggtaaagtttgacacccgcaacttcagactggggtttgaccccgtcactggtcttgtcatgcctggggtatatacaaacgaagccttccatccagacatcattttgctgccaggatgcggggtggacttcacccacagccgcctgagcaacttgttgggcatccgcaagcggcaacccttccaggagggctttaggatcacctacgatgatctggagggtggtaacattcccgcactgttggatgtggacgcctaccaggcgagcttgaaagatgacaccgaacagggcgggggtggcgcaggcggcagcaacagcagtggcagcggcgcggaagagaactccaacgcggcagccgcggcaatgcagccggtggaggacatgaacgatcatgccattcgcggcgacacctttgccacacgggctgaggagaagcgcgctgaggccgaagcagcggccgaagctgccgcccccgctgcgcaacccgaggtcgagaagcctcagaagaaaccggtgatcaaacccctgacagaggacagcaagaaacgcagttacaacctaataagcaatgacagcaccttcacccagtaccgcagctggtaccttgcatacaactacggcgaccctcagaccggaatccgctcatggaccctgctttgcactcctgacgtaacctgcggctcggagcaggtctactggtcgttgccagacatgatgcaagaccccgtgaccttccgctccacgcgccagatcagcaactttccggtggtgggcgccgagctgttgcccgtgcactccaagagcttctacaacgaccaggccgtctactcccaactcatccgccagtttacctctctgacccacgtgttcaatcgctttcccgagaaccagattttggcgcgcccgccagcccccaccatcaccaccgtcagtgaaaacgttcctgctctcacagatcacgggacgctaccgctgcgcaacagcatcggaggagtccagcgagtgaccattactgacgccagacgccgcacctgcccctacgtttacaaggccctgggcatagtctcgccgcgcgtcctatcgagccgcactttttgagcaagcatgtccatccttatatcgcccagcaataacacaggctggggcctgcgcttcccaagcaagatgtttggcggggccaagaagcgctccgaccaacacccagtgcgcgtgcgcgggcactaccgcgcgccctggggcgcgcacaaacgcggccgcactgggcgcaccaccgtcgatgacgccatcgacgcggtggtggaggaggcgcgcaactacacgcccacgccgccaccagtgtccacagtggacgcggccattcagaccgtggtgcgcggagcccggcgctatgctaaaatgaagagacggcggaggcgcgtagcacgtcgccaccgccgccgacccggcactgccgcccaacgcgcggcggcggccctgcttaaccgcgcacgtcgcaccggccgacgggcggccatgcgggccgctcgaaggctggccgcgggtattgtcactgtgccccccaggtccaggcgacgagcggccgccgcagcagccgcggccattagtgctatgactcagggtcgcaggggcaacgtgtattgggtgcgcgactcggttagcggcctgcgcgtgcccgtgcgcacccgccccccgcgcaactagattgcaagaaaaaactacttagactcgtactgttgtatgtatccagcggcggcggcgcgcaacgaagctatgtccaagcgcaaaatcaaagaagagatgctccaggtcatcgcgccggagatctatggccccccgaagaaggaagagcaggattacaagccccgaaagctaaagcgggtcaaaaagaaaaagaaagatgatgatgatgaacttgacgacgaggtggaactgctgcacgctaccgcgcccaggcgacgggtacagtggaaaggtcgacgcgtaaaacgtgttttgcgacccggcaccaccgtagtctttacgcccggtgagcgctccacccgcacctacaagcgcgtgtatgatgaggtgtacggcgacgaggacctgcttgagcaggccaacgagcgcctcggggagtttgcctacggaaagcggcataaggacatgctggcgttgccgctggacgagggcaacccaacacctagcctaaagcccgtaacactgcagcaggtgctgcccgcgcttgcaccgtccgaagaaaagcgcggcctaaagcgcgagtctggtgacttggcacccaccgtgcagctgatggtacccaagcgccagcgactggaagatgtcttggaaaaaatgaccgtggaacctgggctggagcccgaggtccgcgtgcggccaatcaagcaggtggcgccgggactgggcgtgcagaccgtggacgttcagatacccactaccagtagcaccagtattgccaccgccacagagggcatggagacacaaacgtccccggttgcctcagcggtggcggatgccgcggtgcaggcggtcgctgcggccgcgtccaagacctctacggaggtgcaaacggacccgtggatgtttcgcgtttcagccccccggcgcccgcgccgttcgaggaagtacggcgccgccagcgcgctactgcccgaatatgccctacatccttccattgcgcctacccccggctatcgtggctacacctaccgccccagaagacgagcaactacccgacgccgaaccaccactggaacccgccgccgccgtcgccgtcgccagcccgtgctggccccgatttccgtgcgcagggtggctcgcgaaggaggcaggaccctggtgctgccaacagcgcgctaccaccccagcatcgtttaaaagccggtctttgtggttcttgcagatatggccctcacctgccgcctccgtttcccggtgccgggattccgaggaagaatgcaccgtaggaggggcatggccggccacggcctgacgggcggcatgcgtcgtgcgcaccaccggcggcggcgcgcgtcgcaccgtcgcatgcgcggcggtatcctgcccctccttattccactgatcgccgcggcgattggcgccgtgcccggaattgcatccgtggccttgcaggcgcagagacactgattaaaaacaagttgcatgtggaaaaatcaaaataaaaagtctggactctcacgctcgcttggtcctgtaactattttgtagaatggaagacatcaactttgcgtctctggccccgcgacacggctcgcgcccgttcatgggaaactggcaagatatcggcaccagcaatatgagcggtggcgccttcagctggggctcgctgtggagcggcattaaaaatttcggttccaccgttaagaactatggcagcaaggcctggaacagcagcacaggccagatgctgagggataagttgaaagagcaaaatttccaacaaaaggtggtagatggcctggcctctggcattagcggggtggtggacctggccaaccaggcagtgcaaaataagattaacagtaagcttgatccccgccctcccgtagaggagcctccaccggccgtggagacagtgtctccagaggggcgtggcgaaaagcgtccgcgccccgacagggaagaaactctggtgacgcaaatagacgagcctccctcgtacgaggaggcactaaagcaaggcctgcccaccacccgtcccatcgcgcccatggctaccggagtgctgggccagcacacacccgtaacgctggacctgcctccccccgccgacacccagcagaaacctgtgctgccaggcccgaccgccgttgttgtaacccgtcctagccgcgcgtccctgcgccgcgccgccagcggtccgcgatcgttgcggcccgtagccagtggcaactggcaaagcacactgaacagcatcgtgggtctgggggtgcaatccctgaagcgccgacgatgcttctgatagctaacgtgtcgtatgtgtgtcatgtatgcgtccatgtcgccgccagaggagctgctgagccgccgcgcgcccgctttccaagatggctaccccttcgatgatgccgcagtggtcttacatgcacatctcgggccaggacgcctcggagtacctgagccccgggctggtgcagtttgcccgcgccaccgagacgtacttcagcctgaataacaagtttagaaaccccacggtggcgcctacgcacgacgtgaccacagaccggtcccagcgtttgacgctgcggttcatccctgtggaccgtgaggatactgcgtactcgtacaaggcgcggttcaccctagctgtgggtgataaccgtgtgctggacatggcttccacgtactttgacatccgcggcgtgctggacaggggccctacttttaagccctactctggcactgcctacaacgccctggctcccaagggtgccccaaatccttgcgaatgggatgaagctgctactgctcttgaaataaacctagaagaagaggacgatgacaacgaagacgaagtagacgagcaagctgagcagcaaaaaactcacgtatttgggcaggcgccttattctggtataaatattacaaaggagggtattcaaataggtgtcgaaggtcaaacacctaaatatgccgataaaacatttcaacctgaacctcaaataggagaatctcagtggtacgaaacagaaattaatcatgcagctgggagagtcctaaaaaagactaccccaatgaaaccatgttacggttcatatgcaaaacccacaaatgaaaatggagggcaaggcattcttgtaaagcaacaaaatggaaagctagaaagtcaagtggaaatgcaatttttctcaactactgaggcagccgcaggcaatggtgataacttgactcctaaagtggtattgtacagtgaagatgtagatatagaaaccccagacactcatatttcttacatgcccactattaaggaaggtaactcacgagaactaatgggccaacaatctatgcccaacaggcctaattacattgcttttagggacaattttattggtctaatgtattacaacagcacgggtaatatgggtgttctggcgggccaagcatcgcagttgaatgctgttgtagatttgcaagacagaaacacagagctttcataccagcttttgcttgattccattggtgatagaaccaggtacttttctatgtggaatcaggctgttgacagctatgatccagatgttagaattattgaaaatcatggaactgaagatgaacttccaaattactgctttccactgggaggtgtgattaatacagagactcttaccaaggtaaaacctaaaacaggtcaggaaaatggatgggaaaaagatgctacagaattttcagataaaaatgaaataagagttggaaataattttgccatggaaatcaatctaaatgccaacctgtggagaaatttcctgtactccaacatagcgctgtatttgcccgacaagctaaagtacagtccttccaacgtaaaaatttctgataacccaaacacctacgactacatgaacaagcgagtggtggctcccgggctagtggactgctacattaaccttggagcacgctggtcccttgactatatggacaacgtcaacccatttaaccaccaccgcaatgctggcctgcgctaccgctcaatgttgctgggcaatggtcgctatgtgcccttccacatccaggtgcctcagaagttctttgccattaaaaacctccttctcctgccgggctcatacacctacgagtggaacttcaggaaggatgttaacatggttctgcagagctccctaggaaatgacctaagggttgacggagccagcattaagtttgatagcatttgcctttacgccaccttcttccccatggcccacaacaccgcctccacgcttgaggccatgcttagaaacgacaccaacgaccagtcctttaacgactatctctccgccgccaacatgctctaccctatacccgccaacgctaccaacgtgcccatatccatcccctcccgcaactgggcggctttccgcggctgggccttcacgcgccttaagactaaggaaaccccatcactgggctcgggctacgacccttattacacctactctggctctataccctacctagatggaaccttttacctcaaccacacctttaagaaggtggccattacctttgactcttctgtcagctggcctggcaatgaccgcctgcttacccccaacgagtttgaaattaagcgctcagttgacggggagggttacaacgttgcccagtgtaacatgaccaaagactggttcctggtacaaatgctagctaactataacattggctaccagggcttctatatcccagagagctacaaggaccgcatgtactccttctttagaaacttccagcccatgagccgtcaggtggtggatgatactaaatacaaggactaccaacaggtgggcatcctacaccaacacaacaactctggatttgttggctaccttgcccccaccatgcgcgaaggacaggcctaccctgctaacttcccctatccgcttataggcaagaccgcagttgacagcattacccagaaaaagtttctttgcgatcgcaccctttggcgcatcccattctccagtaactttatgtccatgggcgcactcacagacctgggccaaaaccttctctacgccaactccgcccacgcgctagacatgacttttgaggtggatcccatggacgagcccacccttctttatgttttgtttgaagtctttgacgtggtccgtgtgcaccagccgcaccgcggcgtcatcgaaaccgtgtacctgcgcacgcccttctcggccggcaacgccacaacataaagaagcaagcaacatcaacaacagctgccgccatgggctccagtgagcaggaactgaaagccattgtcaaagatcttggttgtgggccatattttttgggcacctatgacaagcgctttccaggctttgtttctccacacaagctcgcctgcgccatagtcaatacggccggtcgcgagactgggggcgtacactggatggcctttgcctggaacccgcactcaaaaacatgctacctctttgagccctttggcttttctgaccagcgactcaagcaggtttaccagtttgagtacgagtcactcctgcgccgtagcgccattgcttcttcccccgaccgctgtataacgctggaaaagtccacccaaagcgtacaggggcccaactcggccgcctgtggactattctgctgcatgtttctccacgcctttgccaactggccccaaactcccatggatcacaaccccaccatgaaccttattaccggggtacccaactccatgctcaacagtccccaggtacagcccaccctgcgtcgcaaccaggaacagctctacagcttcctggagcgccactcgccctacttccgcagccacagtgcgcagattaggagcgccacttctttttgtcacttgaaaaacatgtaaaaataatgtactagagacactttcaataaaggcaaatgcttttatttgtacactctcgggtgattatttacccccacccttgccgtctgcgccgtttaaaaatcaaaggggttctgccgcgcatcgctatgcgccactggcagggacacgttgcgatactggtgtttagtgctccacttaaactcaggcacaaccatccgcggcagctcggtgaagttttcactccacaggctgcgcaccatcaccaacgcgtttagcaggtcgggcgccgatatcttgaagtcgcagttggggcctccgccctgcgcgcgcgagttgcgatacacagggttgcagcactggaacactatcagcgccgggtggtgcacgctggccagcacgctcttgtcggagatcagatccgcgtccaggtcctccgcgttgctcagggcgaacggagtcaactttggtagctgccttcccaaaaagggcgcgtgcccaggctttgagttgcactcgcaccgtagtggcatcaaaaggtgaccgtgcccggtctgggcgttaggatacagcgcctgcataaaagccttgatctgcttaaaagccacctgagcctttgcgccttcagagaagaacatgccgcaagacttgccggaaaactgattggccggacaggccgcgtcgtgcacgcagcaccttgcgtcggtgttggagatctgcaccacatttcggccccaccggttcttcacgatcttggccttgctagactgctccttcagcgcgcgctgcccgttttcgctcgtcacatccatttcaatcacgtgctccttatttatcataatgcttccgtgtagacacttaagctcgccttcgatctcagcgcagcggtgcagccacaacgcgcagcccgtgggctcgtgatgcttgtaggtcacctctgcaaacgactgcaggtacgcctgcaggaatcgccccatcatcgtcacaaaggtcttgttgctggtgaaggtcagctgcaacccgcggtgctcctcgttcagccaggtcttgcatacggccgccagagcttccacttggtcaggcagtagtttgaagttcgcctttagatcgttatccacgtggtacttgtccatcagcgcgcgcgcagcctccatgcccttctcccacgcagacacgatcggcacactcagcgggttcatcaccgtaatttcactttccgcttcgctgggctcttcctcttcctcttgcgtccgcataccacgcgccactgggtcgtcttcattcagccgccgcactgtgcgcttacctcctttgccatgcttgattagcaccggtgggttgctgaaacccaccatttgtagcgccacatcttctctttcttcctcgctgtccacgattacctctggtgatggcgggcgctcgggcttgggagaagggcgcttctttttcttcttgggcgcaatggccaaatccgccgccgaggtcgatggccgcgggctgggtgtgcgcggcaccagcgcgtcttgtgatgagtcttcctcgtcctcggactcgatacgccgcctcatccgcttttttgggggcgcccggggaggcggcggcgacggggacggggacgacacgtcctccatggttgggggacgtcgcgccgcaccgcgtccgcgctcgggggtggtttcgcgctgctcctcttcccgactggccatttccttctcctataggcagaaaaagatcatggagtcagtcgagaagaaggacagcctaaccgccccctctgagttcgccaccaccgcctccaccgatgccgccaacgcgcctaccaccttccccgtcgaggcacccccgcttgaggaggaggaagtgattatcgagcaggacccaggttttgtaagcgaagacgacgaggaccgctcagtaccaacagaggataaaaagcaagaccaggacaacgcagaggcaaacgaggaacaagtcgggcggggggacgaaaggcatggcgactacctagatgtgggagacgacgtgctgttgaagcatctgcagcgccagtgcgccattatctgcgacgcgttgcaagagcgcagcgatgtgcccctcgccatagcggatgtcagccttgcctacgaacgccacctattctcaccgcgcgtaccccccaaacgccaagaaaacggcacatgcgagcccaacccgcgcctcaacttctaccccgtatttgccgtgccagaggtgcttgccacctatcacatctttttccaaaactgcaagatacccctatcctgccgtgccaaccgcagccgagcggacaagcagctggccttgcggcagggcgctgtcatacctgatatcgcctcgctcaacgaagtgccaaaaatctttgagggtcttggacgcgacgagaagcgcgcggcaaacgctctgcaacaggaaaacagcgaaaatgaaagtcactctggagtgttggtggaactcgagggtgacaacgcgcgcctagccgtactaaaacgcagcatcgaggtcacccactttgcctacccggcacttaacctaccccccaaggtcatgagcacagtcatgagtgagctgatcgtgcgccgtgcgcagcccctggagagggatgcaaatttgcaagaacaaacagaggagggcctacccgcagttggcgacgagcagctagcgcgctggcttcaaacgcgcgagcctgccgacttggaggagcgacgcaaactaatgatggccgcagtgctcgttaccgtggagcttgagtgcatgcagcggttctttgctgacccggagatgcagcgcaagctagaggaaacattgcactacacctttcgacagggctacgtacgccaggcctgcaagatctccaacgtggagctctgcaacctggtctcctaccttggaattttgcacgaaaaccgccttgggcaaaacgtgcttcattccacgctcaagggcgaggcgcgccgcgactacgtccgcgactgcgtttacttatttctatgctacacctggcagacggccatgggcgtttggcagcagtgcttggaggagtgcaacctcaaggagctgcagaaactgctaaagcaaaacttgaaggacctatggacggccttcaacgagcgctccgtggccgcgcacctggcggacatcattttccccgaacgcctgcttaaaaccctgcaacagggtctgccagacttcaccagtcaaagcatgttgcagaactttaggaactttatcctagagcgctcaggaatcttgcccgccacctgctgtgcacttcctagcgactttgtgcccattaagtaccgcgaatgccctccgccgctttggggccactgctaccttctgcagctagccaactaccttgcctaccactctgacataatggaagacgtgagcggtgacggtctactggagtgtcactgtcgctgcaacctatgcaccccgcaccgctccctggtttgcaattcgcagctgcttaacgaaagtcaaattatcggtacctttgagctgcagggtccctcgcctgacgaaaagtccgcggctccggggttgaaactcactccggggctgtggacgtcggcttaccttcgcaaatttgtacctgaggactaccacgcccacgagattaggttctacgaagaccaatcccgcccgcctaatgcggagcttaccgcctgcgtcattacccagggccacattcttggccaattgcaagccatcaacaaagcccgccaagagtttctgctacgaaagggacggggggtttacttggacccccagtccggcgaggagctcaacccaatccccccgccgccgcagccctatcagcagcagccgcgggcccttgcttcccaggatggcacccaaaaagaagctgcagctgccgccgccacccacggacgaggaggaatactgggacagtcaggcagaggaggttttggacgaggaggaggaggacatgatggaagactgggagagcctagacgaggaagcttccgaggtcgaagaggtgtcagacgaaacaccgtcaccctcggtcgcattcccctcgccggcgccccagaaatcggcaaccggttccagcatggctacaacctccgctcctcaggcgccgccggcactgcccgttcgccgacccaaccgtagatgggacaccactggaaccagggccggtaagtccaagcagccgccgccgttagcccaagagcaacaacagcgccaaggctaccgctcatggcgcgggcacaagaacgccatagttgcttgcttgcaagactgtgggggcaacatctccttcgcccgccgctttcttctctaccatcacggcgtggccttcccccgtaacatcctgcattactaccgtcatctctacagcccatactgcaccggcggcagcggcagcaacagcagcggccacacagaagcaaaggcgaccggatagcaagactctgacaaagcccaagaaatccacagcggcggcagcagcaggaggaggagcgctgcgtctggcgcccaacgaacccgtatcgacccgcgagcttagaaacaggatttttcccactctgtatgctatatttcaacagagcaggggccaagaacaagagctgaaaataaaaaacaggtctctgcgatccctcacccgcagctgcctgtatcacaaaagcgaagatcagcttcggcgcacgctggaagacgcggaggctctcttcagtaaatactgcgcgctgactcttaaggactagtttcgcgccctttctcaaatttaagcgcgaaaactacgtcatctccagcggccacacccggcgccagcacctgttgtcagcgccattatgagcaaggaaattcccacgccctacatgtggagttaccagccacaaatgggacttgcggctggagctgcccaagactactcaacccgaataaactacatgagcgcgggaccccacatgatatcccgggtcaacggaatacgcgcccaccgaaaccgaattctcctggaacaggcggctattaccaccacacctcgtaataaccttaatccccgtagttggcccgctgccctggtgtaccaggaaagtcccgctcccaccactgtggtacttcccagagacgcccaggccgaagttcagatgactaactcaggggcgcagcttgcgggcggctttcgtcacagggtgcggtcgcccgggcagggtataactcacctgacaatcagagggcgaggtattcagctcaacgacgagtcggtgagctcctcgcttggtctccgtccggacgggacatttcagatcggcggcgccggccgctcttcattcacgcctcgtcaggcaatcctaactctgcagacctcgtcctctgagccgcgctctggaggcattggaactctgcaatttattgaggagtttgtgccatcggtctactttaaccccttctcgggacctcccggccactatccggatcaatttattcctaactttgacgcggtaaaggactcggcggacggctacgactgaatgttaagtggagaggcagagcaactgcgcctgaaacacctggtccactgtcgccgccacaagtgctttgcccgcgactccggtgagttttgctactttgaattgcccgaggatcatatcgagggcccggcgcacggcgtccggcttaccgcccagggagagcttgcccgtagcctgattcgggagtttacccagcgccccctgctagttgagcgggacaggggaccctgtgttctcactgtgatttgcaactgtcctaaccctggattacatcaagatcctctagttaatgtcaggtcgcctaagtcgattaactagagtacccggggatcttattccctttaactaataaaaaaaaataataaagcatcacttacttaaaatcagttagcaaatttctgtccagtttattcagcagcacctccttgccctcctcccagctctggtattgcagcttcctcctggctgcaaactttctccacaatctaaatggaatgtcagtttcctcctgttcctgtccatccgcacccactatcttcatgttgttgcagatgaagcgcgcaagaccgtctgaagataccttcaaccccgtgtatccatatgacacggaaaccggtcctccaactgtgccttttcttactcctccctttgtatcccccaatgggtttcaagagagtccccctggggtactctctttgcgcctatccgaacctctagttacctccaatggcatgcttgcgctcaaaatgggcaacggcctctctctggacgaggccggcaaccttacctcccaaaatgtaaccactgtgagcccacctctcaaaaaaaccaagtcaaacataaacctggaaatatctgcacccctcacagttacctcagaagccctaactgtggctgccgccgcacctctaatggtcgcgggcaacacactcaccatgcaatcacaggccccgctaaccgtgcacgactccaaacttagcattgccacccaaggacccctcacagtgtcagaaggaaagctagccctgcaaacatcaggccccctcaccaccaccgatagcagtacccttactatcactgcctcaccccctctaactactgccactggtagcttgggcattgacttgaaagagcccatttatacacaaaatggaaaactaggactaaagtacggggctcctttgcatgtaacagacgacctaaacactttgaccgtagcaactggtccaggtgtgactattaataatacttccttgcaaactaaagttactggagccttgggttttgattcacaaggcaatatgcaacttaatgtagcaggaggactaaggattgattctcaaaacagacgccttatacttgatgttagttatccgtttgatgctcaaaaccaactaaatctaagactaggacagggccctctttttataaactcagcccacaacttggatattaactacaacaaaggcctttacttgtttacagcttcaaacaattccaaaaagcttgaggttaacctaagcactgccaaggggttgatgtttgacgctacagccatagccattaatgcaggagatgggcttgaatttggttcacctaatgcaccaaacacaaatcccctcaaaacaaaaattggccatggcctagaatttgattcaaacaaggctatggttcctaaactaggaactggccttagttttgacagcacaggtgccattacagtaggaaacaaaaataatgataagctaactttgtggaccggaataaaccctccacctaactgtcaaattgtggaaaacactaatacaaatgatggcaaacttactttagtattagtaaaaaatggagggcttgttaatggctacgtgtctctagttggtgtatcagacactgtgaaccaaatgttcacacaaaagacagcaaacatccaattaagattatattttgactcttctggaaatctattaactgaggaatcagacttaaaaattccacttaaaaataaatcttctacagcgaccagtgaaactgtagccagcagcaaagcctttatgccaagtactacagcttatcccttcaacaccactactagggatagtgaaaactacattcatggaatatgttactacatgactagttatgatagaagtctatttcccttgaacatttctataatgctaaacagccgtatgatttcttccaatgttgcctatgccatacaatttgaatggaatctaaatgcaagtgaatctccagaaagcaacatagctacgctgaccacatccccctttttcttttcttacattacagaagacgacaactaaagaatcgtttgtgttatgtttcaacgtgtttatttttcaattgcagaaaatttcaagtcatttttcattcagtagtatagccccaccaccacatagcttatacagatcaccgtaccttaatcaaactcacagaaccctagtattcaacctgccacctccctcccaacacacagagtacacagtcctttctccccggctggccttaaaaagcatcatatcatgggtaacagacatattcttaggtgttatattccacacggtttcctgtcgagccaaacgctcatcagtgatattaataaactccccgggcagctcacttaagttcatgtcgctgtccagctgctgagccacaggctgctgtccaacttgcggttgcttaacgggcggcgaaggagaagtccacgctcacaggatagggcggtggtgctgcagcagcgcgcgaataaactgctgccgccgccgctccgtcctgcaggaatacaacatggcagtggtctcctcagcgatgattcgcaccgcccgcagcataaggcgccttgtcctccgggcacagcagcgcaccctgatctcacttaaatcagcacagtaactgcagcacagcaccacaatattgttcaaaatcccacagtgcaaggcgctgtatccaaagctcatggcggggaccacagaacccacgtggccatcataccacaagcgcaggtagattaagtggcgacccctcataaacacgctggacataaacattacctcttttggcatgttgtaattcaccacctcccggtaccatataaacctctgattaaacatggcgccatccaccaccatcctaaaccagctggccaaaacctgcccgccggctatacactgcagggaaccgggactggaacaatgacagtggagagcccaggactcgtaaccatggatcatcatgctcgtcatgatatcaatgttggcacaacacaggcacacgtgcatacacttcctcaggattacaagctcctcccgcgttagaaccatatcccagggaacaacccattcctgaatcagcgtaaatcccacactgcagggaagacctcgcacgtaactcacgttgtgcattgtcaaagtgttacattcgggcagcagcggatgatcctccagtatggtagcgcgggtttctgtctcaaaaggaggtagacgatccctactgtacggagtgcgccgagacaaccgagatcgtgttggtcgtagtgtcatgccaaatggaacgccggacgtagtcatatttcctgaagcaaaaccaggtgcgggcgtgacaaacagatctgcgtctccggtctcgccgcttagatcgctctgtgtagtagttgtagtatatccactctctcaaagcatccaggcgccccctggcttcgggttctatgtaaactccttcatgcgccgctgccctgataacatccaccaccgcagaataagccacacccagccaacctacacattcgttctgcgagtcacacacgggaggagcgggaagagctggaagaaccatgtttttttttttattccaaaagattatccaaaacctcaaaatgaagatctattaagtgaacgcgctcccctccggtggcgtggtcaaactctacagccaaagaacagataatggcatttgtaagatgttgcacaatggcttccaaaaggcaaacggccctcacgtccaagtggacgtaaaggctaaacccttcagggtgaatctcctctataaacattccagcaccttcaaccatgcccaaataattctcatctcgccaccttctcaatatatctctaagcaaatcccgaatattaagtccggccattgtaaaaatctgctccagagcgccctccaccttcagcctcaagcagcgaatcatgattgcaaaaattcaggttcctcacagacctgtataagattcaaaagcggaacattaacaaaaataccgcgatcccgtaggtcccttcgcagggccagctgaacataatcgtgcaggtctgcacggaccagcgcggccacttccccgccaggaaccatgacaaaagaacccacactgattatgacacgcatactcggagctatgctaaccagcgtagccccgatgtaagcttgttgcatgggcggcgatataaaatgcaaggtgctgctcaaaaaatcaggcaaagcctcgcgcaaaaaagaaagcacatcgtagtcatgctcatgcagataaaggcaggtaagctccggaaccaccacagaaaaagacaccatttttctctcaaacatgtctgcgggtttctgcataaacacaaaataaaataacaaaaaaacatttaaacattagaagcctgtcttacaacaggaaaaacaacccttataagcataagacggactacggccatgccggcgtgaccgtaaaaaaactggtcaccgtgattaaaaagcaccaccgacagctcctcggtcatgtccggagtcataatgtaagactcggtaaacacatcaggttgattcacatcggtcagtgctaaaaagcgaccgaaatagcccgggggaatacatacccgcaggcgtagagacaacattacagcccccataggaggtataacaaaattaataggagagaaaaacacataaacacctgaaaaaccctcctgcctaggcaaaatagcaccctcccgctccagaacaacatacagcgcttccacagcggcagccataacagtcagccttaccagtaaaaaagaaaacctattaaaaaaacaccactcgacacggcaccagctcaatcagtcacagtgtaaaaaagggccaagtgcagagcgagtatatataggactaaaaaatgacgtaacggttaaagtccacaaaaaacacccagaaaaccgcacgcgaacctacgcccagaaacgaaagccaaaaaacccacaacttcctcaaatcgtcacttccgttttcccacgttacgtcacttcccattttaagaaaactacaattcccaacacatacaagttactccgccctaaaacctacgtcacccgccccgttcccacgccccgcgccacgtcacaaactccaccccctcattatcatattggcttcaatccaaaataaggtatattattgatgatg

SEQ ID NO: 36 - DNA, 36395 bp, Artificial Sequence
  Adk35F2-Spike/E4orf6(mPGK)-E4dl-42(E4re#34)
ttaattaacatcatcaataatataccttattttggattgaagccaatatgataatgagggggtggagtttgtgacgtggcgcggggcgtgggaacggggcgggtgacgtagtagtgtggcggaagtgtgatgttgcaagtgtggcggaacacatgtaagcgacggatgtggcaaaagtgacgtttttggtgtgcgccggtgtacacaggaagtgacaattttcgcgcggttttaggcggatgttgtagtaaatttgggcgtaaccgagtaagatttggccattttcgcgggaaaactgaataagaggaagtgaaatctgaataattttgtgttactcatagcgcgtaataatttctgtaatagtaatcaattacggggtcattagttcatagcccatatatggagttccgcgttacataacttacggtaaatggcccgcctggctgaccgcccaacgacccccgcccattgacgtcaataatgacgtatgttcccatagtaacgccaatagggactttccattgacgtcaatgggtggagtatttacggtaaactgcccacttggcagtacatcaagtgtatcatatgccaagtacgccccctattgacgtcaatgacggtaaatggcccgcctggcattatgcccagtacatgaccttatgggactttcctacttggcagtacatctacgtattagtcatcgctattaccatggtgatgcggttttggcagtacatcaatgggcgtggatagcggtttgactcacggggatttccaagtctccaccccattgacgtcaatgggagtttgttttggcaccaaaatcaacgggactttccaaaatgtcgtaacaactccgccccattgacgcaaatgggcggtaggcgtgtacggtgggaggtctatataagcagagctctccctatcagtgatagagatctccctatcagtgatagagatcgtcgacgagctcgtttagtgaaccgtcagatcgcctggagacgccatccacgctgttttgacctccatagaagacaccgggaccgatccagcctccgatttgccaccatgtttgtgttcctggtgctgctgccactggtgtccagccagtgtgtgaacctgaccaccaggacccaacttcctcctgcctacaccaactccttcaccaggggagtctactaccctgacaaggtgttcaggtcctctgtgctgcacagcacccaggacctgttcctgccattcttcagcaatgtgacctggttccatgccatccatgtgtctggcaccaatggcaccaagaggtttgacaaccctgtgctgccattcaatgatggagtctactttgccagcacagagaagagcaacatcatcaggggctggatttttggcaccaccctggacagcaagacccagtccctgctgattgtgaacaatgccaccaatgtggtgattaaggtgtgtgagttccagttctgtaatgacccattcctgggagtctactaccacaagaacaacaagtcctggatggagtctgagttcagggtctactcctctgccaacaactgtacctttgaatatgtgagccaaccattcctgatggacttggagggcaagcagggcaacttcaagaacctgagggagtttgtgttcaagaacattgatggctacttcaagatttacagcaaacacacaccaatcaacctggtgagggacctgccacagggcttctctgccttggaaccactggtggacctgccaattggcatcaacatcaccaggttccagaccctgctggctctgcacaggtcctacctgacacctggagactcctcctctggctggacagcaggagcagcagcctactatgtgggctacctccaaccaaggaccttcctgctgaaatacaatgagaatggcaccatcacagatgctgtggactgtgccctggacccactgtctgagaccaagtgtaccctgaaatccttcacagtggagaagggcatctaccagaccagcaacttcagggtccaaccaacagagagcattgtgaggtttccaaacatcaccaacctgtgtccatttggagaggtgttcaatgccaccaggtttgcctctgtctatgcctggaacaggaagaggattagcaactgtgtggctgactactctgtgctctacaactctgcctccttcagcaccttcaagtgttatggagtgagcccaaccaaactgaatgacctgtgtttcaccaatgtctatgctgactcctttgtgattaggggagatgaggtgagacagattgcccctggacaaacaggcaagattgctgactacaactacaaactgcctgatgacttcacaggctgtgtgattgcctggaacagcaacaacctggacagcaaggtgggaggcaactacaactacctctacagactgttcaggaagagcaacctgaaaccatttgagagggacatcagcacagagatttaccaggctggcagcacaccatgtaatggagtggagggcttcaactgttactttccactccaatcctatggcttccaaccaaccaatggagtgggctaccaaccatacagggtggtggtgctgtcctttgaactgctccatgcccctgccacagtgtgtggaccaaagaagagcaccaacctggtgaagaacaagtgtgtgaacttcaacttcaatggactgacaggcacaggagtgctgacagagagcaacaagaagttcctgccattccaacagtttggcagggacattgctgacaccacagatgctgtgagggacccacagaccttggagattctggacatcacaccatgttcctttggaggagtgtctgtgattacacctggcaccaacaccagcaaccaggtggctgtgctctaccaggatgtgaactgtactgaggtgcctgtggctatccatgctgaccaacttacaccaacctggagggtctacagcacaggcagcaatgtgttccagaccagggctggctgtctgattggagcagagcatgtgaacaactcctatgagtgtgacatcccaattggagcaggcatctgtgcctcctaccagacccagaccggtggcggtgggtcgaggtctgtggcaagccagagcatcattgcctacacaatgagtctgggagcagagaactctgtggcttacagcaacaacagcattgccatcccaaccaacttcaccatctctgtgaccacagagattctgcctgtgagtatgaccaagacctctgtggactgtacaatgtatatctgtggagacagcacagagtgtagcaacctgctgctccaatatggctccttctgtacccaacttaacagggctctgacaggcattgctgtggaacaggacaagaacacccaggaggtgtttgcccaggtgaagcagatttacaagacacctccaatcaaggactttggaggcttcaacttcagccagattctgcctgacccaagcaagccaagcaagaggtccttcattgaggacctgctgttcaacaaggtgaccctggctgatgctggcttcatcaagcaatatggagactgtctgggagacattgctgccagggacctgatttgtgcccagaagttcaatggactgacagtgctgcctccactgctgacagatgagatgattgcccaatacacctctgccctgctggctggcaccatcacctctggctggacctttggagcaggagcagccctccaaatcccatttgctatgcagatggcttacaggttcaatggcattggagtgacccagaatgtgctctatgagaaccagaaactgattgccaaccagttcaactctgccattggcaagattcaggactccctgtccagcacagcctctgccctgggcaaactccaagatgtggtgaaccagaatgcccaggctctgaacaccctggtgaagcaactttccagcaactttggagccatctcctctgtgctgaatgacatcctgagcagactggacaaggtggaggctgaggtccagattgacagactgattacaggcagactccaatccctccaaacctatgtgacccaacaacttatcagggctgctgagattagggcatctgccaacctggctgccaccaagatgagtgagtgtgtgctgggacaaagcaagagggtggacttctgtggcaagggctaccacctgatgagttttccacagtctgcccctcatggagtggtgttcctgcatgtgacctatgtgcctgcccaggagaagaacttcaccacagcccctgccatctgccatgatggcaaggctcactttccaagggagggagtgtttgtgagcaatggcacccactggtttgtgacccagaggaacttctatgaaccacagattatcaccacagacaacacctttgtgtctggcaactgtgatgtggtgattggcattgtgaacaacacagtctatgacccactccaacctgaactggactccttcaaggaggaactggacaaatacttcaagaaccacaccagccctgatgtggacctgggagacatctctggcatcaatgcctctgtggtgaacatccagaaggagattgacagactgaatgaggtggctaagaacctgaatgagtccctgattgacctccaagaactgggcaaatatgaacaatacatcaagtggccatgaaaattgatcataatcagccataccacatttgtagaggttttacttgctttaaaaaacctcccacacctccccctgaacctgaaacataaaatgaatgcaattgttgttgttaacttgtttattgcagcttataatggttacaaataaagcaatagcatcacaaatttcacaaataaagcatttttttcactgcattctagttgtggtttgtccaaactcatcaatgtatcttaacgcggatcgggtaggggaggcgcttttcccaaggcagtctggagcatgcgctttagcagccccgctgggcacttggcgctacacaagtggcctctggcctcgcacacattccacatccaccggtaggcgccaaccggctccgttctttggtggccccttcgcgccaccttctactcctcccctagtcaggaagttcccccccgccccgcagctcgcgtcgtgcaggacgtgacaaatggaagtagcacgtctcactagtctcgtgcagatggacagcaccgctgagcaatggaagcgggtaggcctttggggcagcggccaatagcagctttgctccttcgctttctgggctcagaggctgggaaggggtgggtccgggggcgggctcaggggcgggctcaggggcggggcgggcgcccgaaggtcctccggaggcccggcattctgcacgcttcaaaagcgcacgtctgccgcgctgttctcctcttcctcatctccgggcctttcgaaactaccccaagctggccaccatgactacgtccggcgttccatttggcatgacactacgaccaacacgatctcggttgtctcggcgcactccgtacagtagggatcgtctacctccttttgagacagaaacccgcgctaccatactggaggatcatccgctgctgcccgaatgtaacactttgacaatgcacaacgtgagttacgtgcgaggtcttccctgcagtgtgggatttacgctgattcaggaatgggttgttccctgggatatggttctaacgcgggaggagcttgtaatcctgaggaagtgtatgcacgtgtgcctgtgttgtgccaacattgatatcatgacgagcatgatgatccatggttacgagtcctgggctctccactgtcattgttccagtcccggttccctgcagtgtatagccggcgggcaggttttggccagctggtttaggatggtggtggatggcgccatgtttaatcagaggtttatatggtaccgggaggtggtgaattacaacatgccaaaagaggtaatgtttatgtccagcgtgtttatgaggggtcgccacttaatctacctgcgcttgtggtatgatggccacgtgggttctgtggtccccgccatgagctttggatacagcgccttgcactgtgggattttgaacaatattgtggtgctgtgctgcagttactgtgctgatttaagtgagatcagggtgcgctgctgtgcccggaggacaaggcgccttatgctgcgggcggtgcgaatcatcgctgaggagaccactgccatgttgtattcctgcaggacggagcggcggcggcagcagtttattcgcgcgctgctgcagcaccaccgccctatcctgatgcacgattatgactctacccccatgtagaagcttggggatcaattctctagagctcgctgatcagcctcgactgtgccttctagttgccagccatctgttgtttgcccctcccccgtgccttccttgaccctggaaggtgccactcccactgtcctttcctaataaaatgaggaaattgcatcgcattgtctgagtaggtgtcattctattctggggggtggggtggggcaggacagcaagggggaggattgggaagacaatagcaggcatgctggggatgcggtgggctctatggcttctgaggaaattgggcgtggcttaagggtgggaaagaatatataaggtgggggtcttatgtagttttgtatctgttttgcagcagccgccgccgccatgagcaccaactcgtttgatggaagcattgtgagctcatatttgacaacgcgcatgcccccatgggccggggtgcgtcagaatgtgatgggctccagcattgatggtcgccccgtcctgcccgcaaactctactaccttgacctacgagaccgtgtctggaacgccgttggagactgcagcctccgccgccgcttcagccgctgcagccaccgcccgcgggattgtgactgactttgctttcctgagcccgcttgcaagcagtgcagcttcccgttcatccgcccgcgatgacaagttgacggctcttttggcacaattggattctttgacccgggaacttaatgtcgtttctcagcagctgttggatctgcgccagcaggtttctgccctgaaggcttcctcccctcccaatgcggtttaaaacataaataaaaaaccagactctgtttggatttggatcaagcaagtgtcttgctgtctttatttaggggttttgcgcgcgcggtaggcccgggaccagcggtctcggtcgttgagggtcctgtgtattttttccaggacgtggtaaaggtgactctggatgttcagatacatgggcataagcccgtctctggggtggaggtagcaccactgcagagcttcatgctgcggggtggtgttgtagatgatccagtcgtagcaggagcgctgggcgtggtgcctaaaaatgtctttcagtagcaagctgattgccaggggcaggcccttggtgtaagtgtttacaaagcggttaagctgggatgggtgcatacgtggggatatgagatgcatcttggactgtatttttaggttggctatgttcccagccatatccctccggggattcatgttgtgcagaaccaccagcacagtgtatccggtgcacttgggaaatttgtcatgtagcttagaaggaaatgcgtggaagaacttggagacgcccttgtgacctccaagattttccatgcattcgtccataatgatggcaatgggcccacgggcggcggcctgggcgaagatatttctgggatcactaacgtcatagttgtgttccaggatgagatcgtcataggccatttttacaaagcgcgggcggagggtgccagactgcggtataatggttccatccggcccaggggcgtagttaccctcacagatttgcatttcccacgctttgagttcagatggggggatcatgtctacctgcggggcgatgaagaaaacggtttccggggtaggggagatcagctgggaagaaagcaggttcctgagcagctgcgacttaccgcagccggtgggcccgtaaatcacacctattaccggctgcaactggtagttaagagagctgcagctgccgtcatccctgagcaggggggccacttcgttaagcatgtccctgactcgcatgttttccctgaccaaatccgccagaaggcgctcgccgcccagcgatagcagttcttgcaaggaagcaaagtttttcaacggtttgagaccgtccgccgtaggcatgcttttgagcgtttgaccaagcagttccaggcggtcccacagctcggtcacctgctctacggcatctcgatccagcatatctcctcgtttcgcgggttggggcggctttcgctgtacggcagtagtcggtgctcgtccagacgggccagggtcatgtctttccacgggcgcagggtcctcgtcagcgtagtctgggtcacggtgaaggggtgcgctccgggctgcgcgctggccagggtgcgcttgaggctggtcctgctggtgctgaagcgctgccggtcttcgccctgcgcgtcggccaggtagcatttgaccatggtgtcatagtccagcccctccgcggcgtggcccttggcgcgcagcttgcccttggaggaggcgccgcacgaggggcagtgcagacttttgagggcgtagagcttgggcgcgagaaataccgattccggggagtaggcatccgcgccgcaggccccgcagacggtctcgcattccacgagccaggtgagctctggccgttcggggtcaaaaaccaggtttcccccatgctttttgatgcgtttcttacctctggtttccatgagccggtgtccacgctcggtgacgaaaaggctgtccgtgtccccgtatacagacttgagaggcctgtcctcgagcggtgttccgcggtcctcctcgtatagaaactcggaccactctgagacaaaggctcgcgtccaggccagcacgaaggaggctaagtgggaggggtagcggtcgttgtccactagggggtccactcgctccagggtgtgaagacacatgtcgccctcttcggcatcaaggaaggtgattggtttgtaggtgtaggccacgtgaccgggtgttcctgaaggggggctataaaagggggtgggggcgcgttcgtcctcactctcttccgcatcgctgtctgcgagggccagctgttggggtgagtactccctctgaaaagcgggcatgacttctgcgctaagattgtcagtttccaaaaacgaggaggatttgatattcacctggcccgcggtgatgcctttgagggtggccgcatccatctggtcagaaaagacaatctttttgttgtcaagcttggtggcaaacgacccgtagagggcgttggacagcaacttggcgatggagcgcagggtttggtttttgtcgcgatcggcgcgctccttggccgcgatgtttagctgcacgtattcgcgcgcaacgcaccgccattcgggaaagacggtggtgcgctcgtcgggcaccaggtgcacgcgccaaccgcggttgtgcagggtgacaaggtcaacgctggtggctacctctccgcgtaggcgctcgttggtccagcagaggcggccgcccttgcgcgagcagaatggcggtagggggtctagctgcgtctcgtccggggggtctgcgtccacggtaaagaccccgggcagcaggcgcgcgtcgaagtagtctatcttgcatccttgcaagtctagcgcctgctgccatgcgcgggcggcaagcgcgcgctcgtatgggttgagtgggggaccccatggcatggggtgggtgagcgcggaggcgtacatgccgcaaatgtcgtaaacgtagaggggctctctgagtattccaagatatgtagggtagcatcttccaccgcggatgctggcgcgcacgtaatcgtatagttcgtgcgagggagcgaggaggtcgggaccgaggttgctacgggcgggctgctctgctcggaagactatctgcctgaagatggcatgtgagttggatgatatggttggacgctggaagacgttgaagctggcgtctgtgagacctaccgcgtcacgcacgaaggaggcgtaggagtcgcgcagcttgttgaccagctcggcggtgacctgcacgtctagggcgcagtagtccagggtttccttgatgatgtcatacttatcctgtcccttttttttccacagctcgcggttgaggacaaactcttcgcggtctttccagtactcttggatcggaaacccgtcggcctccgaacggtaagagcctagcatgtagaactggttgacggcctggtaggcgcagcatcccttttctacgggtagcgcgtatgcctgcgcggccttccggagcgaggtgtgggtgagcgcaaaggtgtccctgaccatgactttgaggtactggtatttgaagtcagtgtcgtcgcatccgccctgctcccagagcaaaaagtccgtgcgctttttggaacgcggatttggcagggcgaaggtgacatcgttgaagagtatctttcccgcgcgaggcataaagttgcgtgtgatgcggaagggtcccggcacctcggaacggttgttaattacctgggcggcgagcacgatctcgtcaaagccgttgatgttgtggcccacaatgtaaagttccaagaagcgcgggatgcccttgatggaaggcaattttttaagttcctcgtaggtgagctcttcaggggagctgagcccgtgctctgaaagggcccagtctgcaagatgagggttggaagcgacgaatgagctccacaggtcacgggccattagcatttgcaggtggtcgcgaaaggtcctaaactggcgacctatggccattttttctggggtgatgcagtagaaggtaagcgggtcttgttcccagcggtcccatccaaggttcgcggctaggtctcgcgcggcagtcactagaggctcatctccgccgaacttcatgaccagcatgaagggcacgagctgcttcccaaaggcccccatccaagtataggtctctacatcgtaggtgacaaagagacgctcggtgcgaggatgcgagccgatcgggaagaactggatctcccgccaccaattggaggagtggctattgatgtggtgaaagtagaagtccctgcgacgggccgaacactcgtgctggcttttgtaaaaacgtgcgcagtactggcagcggtgcacgggctgtacatcctgcacgaggttgacctgacgaccgcgcacaaggaagcagagtgggaatttgagcccctcgcctggcgggtttggctggtggtcttctacttcggctgcttgtccttgaccgtctggctgctcgaggggagttacggtggatcggaccaccacgccgcgcgagcccaaagtccagatgtccgcgcgcggcggtcggagcttgatgacaacatcgcgcagatgggagctgtccatggtctggagctcccgcggcgtcaggtcaggcgggagctcctgcaggtttacctcgcatagacgggtcagggcgcgggctagatccaggtgatacctaatttccaggggctggttggtggcggcgtcgatggcttgcaagaggccgcatccccgcggcgcgactacggtaccgcgcggcgggcggtgggccgcgggggtgtccttggatgatgcatctaaaagcggtgacgcgggcgagcccccggaggtagggggggctccggacccgccgggagagggggcaggggcacgtcggcgccgcgcgcgggcaggagctggtgctgcgcgcgtaggttgctggcgaacgcgacgacgcggcggttgatctcctgaatctggcgcctctgcgtgaagacgacgggcccggtgagcttgaacctgaaagagagttcgacagaatcaatttcggtgtcgttgacggcggcctggcgcaaaatctcctgcacgtctcctgagttgtcttgataggcgatctcggccatgaactgctcgatctcttcctcctggagatctccgcgtccggctcgctccacggtggcggcgaggtcgttggaaatgcgggccatgagctgcgagaaggcgttgaggcctccctcgttccagacgcggctgtagaccacgcccccttcggcatcgcgggcgcgcatgaccacctgcgcgagattgagctccacgtgccgggcgaagacggcgtagtttcgcaggcgctgaaagaggtagttgagggtggtggcggtgtgttctgccacgaagaagtacataacccagcgtcgcaacgtggattcgttgatatcccccaaggcctcaaggcgctccatggcctcgtagaagtccacggcgaagttgaaaaactgggagttgcgcgccgacacggttaactcctcctccagaagacggatgagctcggcgacagtgtcgcgcacctcgcgctcaaaggctacaggggcctcttcttcttcttcaatctcctcttccataagggcctccccttcttcttcttctggcggcggtgggggaggggggacacggcggcgacgacggcgcaccgggaggcggtcgacaaagcgctcgatcatctccccgcggcgacggcgcatggtctcggtgacggcgcggccgttctcgcgggggcgcagttggaagacgccgcccgtcatgtcccggttatgggttggcggggggctgccatgcggcagggatacggcgctaacgatgcatctcaacaattgttgtgtaggtactccgccgccgagggacctgagcgagtccgcatcgaccggatcggaaaacctctcgagaaaggcgtctaaccagtcacagtcgcaaggtaggctgagcaccgtggcgggcggcagcgggcggcggtcggggttgtttctggcggaggtgctgctgatgatgtaattaaagtaggcggtcttgagacggcggatggtcgacagaagcaccatgtccttgggtccggcctgctgaatgcgcaggcggtcggccatgccccaggcttcgttttgacatcggcgcaggtctttgtagtagtcttgcatgagcctttctaccggcacttcttcttctccttcctcttgtcctgcatctcttgcatctatcgctgcggcggcggcggagtttggccgtaggtggcgccctcttcctcccatgcgtgtgaccccgaagcccctcatcggctgaagcagggctaggtcggcgacaacgcgctcggctaatatggcctgctgcacctgcgtgagggtagactggaagtcatccatgtccacaaagcggtggtatgcgcccgtgttgatggtgtaagtgcagttggccataacggaccagttaacggtctggtgacccggctgcgagagctcggtgtacctgagacgcgagtaagccctcgagtcaaatacgtagtcgttgcaagtccgcaccaggtactggtatcccaccaaaaagtgcggcggcggctggcggtagaggggccagcgtagggtggccggggctccgggggcgagatcttccaacataaggcgatgatatccgtagatgtacctggacatccaggtgatgccggcggcggtggtggaggcgcgcggaaagtcgcggacgcggttccagatgttgcgcagcggcaaaaagtgctccatggtcgggacgctctggccggtcaggcgcgcgcaatcgttgacgctctagcgtgcaaaaggagagcctgtaagcgggcactcttccgtggtctggtggataaattcgcaagggtatcatggcggacgaccggggttcgagccccgtatccggccgtccgccgtgatccatgcggttaccgcccgcgtgtcgaacccaggtgtgcgacgtcagacaacgggggagtgctccttttggcttccttccaggcgcggcggctgctgcgctagcttttttggccactggccgcgcgcagcgtaagcggttaggctggaaagcgaaagcattaagtggctcgctccctgtagccggagggttattttccaagggttgagtcgcgggacccccggttcgagtctcggaccggccggactgcggcgaacgggggtttgcctccccgtcatgcaagaccccgcttgcaaattcctccggaaacagggacgagccccttttttgcttttcccagatgcatccggtgctgcggcagatgcgcccccctcctcagcagcggcaagagcaagagcagcggcagacatgcagggcaccctcccctcctcctaccgcgtcaggaggggcgacatccgcggttgacgcggcagcagatggtgattacgaacccccgcggcgccgggcccggcactacctggacttggaggagggcgagggcctggcgcggctaggagcgccctctcctgagcggcacccaagggtgcagctgaagcgtgatacgcgtgaggcgtacgtgccgcggcagaacctgtttcgcgaccgcgagggagaggagcccgaggagatgcgggatcgaaagttccacgcagggcgcgagctgcggcatggcctgaatcgcgagcggttgctgcgcgaggaggactttgagcccgacgcgcgaaccgggattagtcccgcgcgcgcacacgtggcggccgccgacctggtaaccgcatacgagcagacggtgaaccaggagattaactttcaaaaaagctttaacaaccacgtgcgtacgcttgtggcgcgcgaggaggtggctataggactgatgcatctgtgggactttgtaagcgcgctggagcaaaacccaaatagcaagccgctcatggcgcagctgttccttatagtgcagcacagcagggacaacgaggcattcagggatgcgctgctaaacatagtagagcccgagggccgctggctgctcgatttgataaacatcctgcagagcatagtggtgcaggagcgcagcttgagcctggctgacaaggtggccgccatcaactattccatgcttagcctgggcaagttttacgcccgcaagatataccataccccttacgttcccatagacaaggaggtaaagatcgaggggttctacatgcgcatggcgctgaaggtgcttaccttgagcgacgacctgggcgtttatcgcaacgagcgcatccacaaggccgtgagcgtgagccggcggcgcgagctcagcgaccgcgagctgatgcacagcctgcaaagggccctggctggcacgggcagcggcgatagagaggccgagtcctactttgacgcgggcgctgacctgcgctgggccccaagccgacgcgccctggaggcagctggggccggacctgggctggcggtggcacccgcgcgcgctggcaacgtcggcggcgtggaggaatatgacgaggacgatgagtacgagccagaggacggcgagtactaagcggtgatgtttctgatcagatgatgcaagacgcaacggacccggcggtgcgggcggcgctgcagagccagccgtccggccttaactccacggacgactggcgccaggtcatggaccgcatcatgtcgctgactgcgcgcaatcctgacgcgttccggcagcagccgcaggccaaccggctctccgcaattctggaagcggtggtcccggcgcgcgcaaaccccacgcacgagaaggtgctggcgatcgtaaacgcgctggccgaaaacagggccatccggcccgacgaggccggcctggtctacgacgcgctgcttcagcgcgtggctcgttacaacagcggcaacgtgcagaccaacctggaccggctggtgggggatgtgcgcgaggccgtggcgcagcgtgagcgcgcgcagcagcagggcaacctgggctccatggttgcactaaacgccttcctgagtacacagcccgccaacgtgccgcggggacaggaggactacaccaactttgtgagcgcactgcggctaatggtgactgagacaccgcaaagtgaggtgtaccagtctgggccagactattttttccagaccagtagacaaggcctgcagaccgtaaacctgagccaggctttcaaaaacttgcaggggctgtggggggtgcgggctcccacaggcgaccgcgcgaccgtgtctagcttgctgacgcccaactcgcgcctgttgctgctgctaatagcgcccttcacggacagtggcagcgtgtcccgggacacatacctaggtcacttgctgacactgtaccgcgaggccataggtcaggcgcatgtggacgagcatactttccaggagattacaagtgtcagccgcgcgctggggcaggaggacacgggcagcctggaggcaaccctaaactacctgctgaccaaccggcggcagaagatcccctcgttgcacagtttaaacagcgaggaggagcgcattttgcgctacgtgcagcagagcgtgagccttaacctgatgcgcgacggggtaacgcccagcgtggcgctggacatgaccgcgcgcaacatggaaccgggcatgtatgcctcaaaccggccgtttatcaaccgcctaatggactacttgcatcgcgcggccgccgtgaaccccgagtatttcaccaatgccatcttgaacccgcactggctaccgccccctggtttctacaccgggggattcgaggtgcccgagggtaacgatggattcctctgggacgacatagacgacagcgtgttttccccgcaaccgcagaccctgctagagttgcaacagcgcgagcaggcagaggcggcgctgcgaaaggaaagcttccgcaggccaagcagcttgtccgatctaggcgctgcggccccgcggtcagatgctagtagcccatttccaagcttgatagggtctcttaccagcactcgcaccacccgcccgcgcctgctgggcgaggaggagtacctaaacaactcgctgctgcagccgcagcgcgaaaaaaacctgcctccggcatttcccaacaacgggatagagagcctagtggacaagatgagtagatggaagacgtacgcgcaggagcacagggacgtgccaggcccgcgcccgcccacccgtcgtcaaaggcacgaccgtcagcggggtctggtgtgggaggacgatgactcggcagacgacagcagcgtcctggatttgggagggagtggcaacccgtttgcgcaccttcgccccaggctggggagaatgttttaaaaaaaaaaaagcatgatgcaaaataaaaaactcaccaaggccatggcaccgagcgttggttttcttgtattccccttagtatgcggcgcgcggcgatgtatgaggaaggtcctcctccctcctacgagagtgtggtgagcgcggcgccagtggcggcggcgctgggttctcccttcgatgctcccctggacccgccgtttgtgcctccgcggtacctgcggcctaccggggggagaaacagcatccgttactctgagttggcacccctattcgacaccacccgtgtgtacctggtggacaacaagtcaacggatgtggcatccctgaactaccagaacgaccacagcaactttctgaccacggtcattcaaaacaatgactacagcccgggggaggcaagcacacagaccatcaatcttgacgaccggtcgcactggggcggcgacctgaaaaccatcctgcataccaacatgccaaatgtgaacgagttcatgtttaccaataagtttaaggcgcgggtgatggtgtcgcgcttgcctactaaggacaatcaggtggagctgaaatacgagtgggtggagttcacgctgcccgagggcaactactccgagaccatgaccatagaccttatgaacaacgcgatcgtggagcactacttgaaagtgggcagacagaacggggttctggaaagcgacatcggggtaaagtttgacacccgcaacttcagactggggtttgaccccgtcactggtcttgtcatgcctggggtatatacaaacgaagccttccatccagacatcattttgctgccaggatgcggggtggacttcacccacagccgcctgagcaacttgttgggcatccgcaagcggcaacccttccaggagggctttaggatcacctacgatgatctggagggtggtaacattcccgcactgttggatgtggacgcctaccaggcgagcttgaaagatgacaccgaacagggcgggggtggcgcaggcggcagcaacagcagtggcagcggcgcggaagagaactccaacgcggcagccgcggcaatgcagccggtggaggacatgaacgatcatgccattcgcggcgacacctttgccacacgggctgaggagaagcgcgctgaggccgaagcagcggccgaagctgccgcccccgctgcgcaacccgaggtcgagaagcctcagaagaaaccggtgatcaaacccctgacagaggacagcaagaaacgcagttacaacctaataagcaatgacagcaccttcacccagtaccgcagctggtaccttgcatacaactacggcgaccctcagaccggaatccgctcatggaccctgctttgcactcctgacgtaacctgcggctcggagcaggtctactggtcgttgccagacatgatgcaagaccccgtgaccttccgctccacgcgccagatcagcaactttccggtggtgggcgccgagctgttgcccgtgcactccaagagcttctacaacgaccaggccgtctactcccaactcatccgccagtttacctctctgacccacgtgttcaatcgctttcccgagaaccagattttggcgcgcccgccagcccccaccatcaccaccgtcagtgaaaacgttcctgctctcacagatcacgggacgctaccgctgcgcaacagcatcggaggagtccagcgagtgaccattactgacgccagacgccgcacctgcccctacgtttacaaggccctgggcatagtctcgccgcgcgtcctatcgagccgcactttttgagcaagcatgtccatccttatatcgcccagcaataacacaggctggggcctgcgcttcccaagcaagatgtttggcggggccaagaagcgctccgaccaacacccagtgcgcgtgcgcgggcactaccgcgcgccctggggcgcgcacaaacgcggccgcactgggcgcaccaccgtcgatgacgccatcgacgcggtggtggaggaggcgcgcaactacacgcccacgccgccaccagtgtccacagtggacgcggccattcagaccgtggtgcgcggagcccggcgctatgctaaaatgaagagacggcggaggcgcgtagcacgtcgccaccgccgccgacccggcactgccgcccaacgcgcggcggcggccctgcttaaccgcgcacgtcgcaccggccgacgggcggccatgcgggccgctcgaaggctggccgcgggtattgtcactgtgccccccaggtccaggcgacgagcggccgccgcagcagccgcggccattagtgctatgactcagggtcgcaggggcaacgtgtattgggtgcgcgactcggttagcggcctgcgcgtgcccgtgcgcacccgccccccgcgcaactagattgcaagaaaaaactacttagactcgtactgttgtatgtatccagcggcggcggcgcgcaacgaagctatgtccaagcgcaaaatcaaagaagagatgctccaggtcatcgcgccggagatctatggccccccgaagaaggaagagcaggattacaagccccgaaagctaaagcgggtcaaaaagaaaaagaaagatgatgatgatgaacttgacgacgaggtggaactgctgcacgctaccgcgcccaggcgacgggtacagtggaaaggtcgacgcgtaaaacgtgttttgcgacccggcaccaccgtagtctttacgcccggtgagcgctccacccgcacctacaagcgcgtgtatgatgaggtgtacggcgacgaggacctgcttgagcaggccaacgagcgcctcggggagtttgcctacggaaagcggcataaggacatgctggcgttgccgctggacgagggcaacccaacacctagcctaaagcccgtaacactgcagcaggtgctgcccgcgcttgcaccgtccgaagaaaagcgcggcctaaagcgcgagtctggtgacttggcacccaccgtgcagctgatggtacccaagcgccagcgactggaagatgtcttggaaaaaatgaccgtggaacctgggctggagcccgaggtccgcgtgcggccaatcaagcaggtggcgccgggactgggcgtgcagaccgtggacgttcagatacccactaccagtagcaccagtattgccaccgccacagagggcatggagacacaaacgtccccggttgcctcagcggtggcggatgccgcggtgcaggcggtcgctgcggccgcgtccaagacctctacggaggtgcaaacggacccgtggatgtttcgcgtttcagccccccggcgcccgcgccgttcgaggaagtacggcgccgccagcgcgctactgcccgaatatgccctacatccttccattgcgcctacccccggctatcgtggctacacctaccgccccagaagacgagcaactacccgacgccgaaccaccactggaacccgccgccgccgtcgccgtcgccagcccgtgctggccccgatttccgtgcgcagggtggctcgcgaaggaggcaggaccctggtgctgccaacagcgcgctaccaccccagcatcgtttaaaagccggtctttgtggttcttgcagatatggccctcacctgccgcctccgtttcccggtgccgggattccgaggaagaatgcaccgtaggaggggcatggccggccacggcctgacgggcggcatgcgtcgtgcgcaccaccggcggcggcgcgcgtcgcaccgtcgcatgcgcggcggtatcctgcccctccttattccactgatcgccgcggcgattggcgccgtgcccggaattgcatccgtggccttgcaggcgcagagacactgattaaaaacaagttgcatgtggaaaaatcaaaataaaaagtctggactctcacgctcgcttggtcctgtaactattttgtagaatggaagacatcaactttgcgtctctggccccgcgacacggctcgcgcccgttcatgggaaactggcaagatatcggcaccagcaatatgagcggtggcgccttcagctggggctcgctgtggagcggcattaaaaatttcggttccaccgttaagaactatggcagcaaggcctggaacagcagcacaggccagatgctgagggataagttgaaagagcaaaatttccaacaaaaggtggtagatggcctggcctctggcattagcggggtggtggacctggccaaccaggcagtgcaaaataagattaacagtaagcttgatccccgccctcccgtagaggagcctccaccggccgtggagacagtgtctccagaggggcgtggcgaaaagcgtccgcgccccgacagggaagaaactctggtgacgcaaatagacgagcctccctcgtacgaggaggcactaaagcaaggcctgcccaccacccgtcccatcgcgcccatggctaccggagtgctgggccagcacacacccgtaacgctggacctgcctccccccgccgacacccagcagaaacctgtgctgccaggcccgaccgccgttgttgtaacccgtcctagccgcgcgtccctgcgccgcgccgccagcggtccgcgatcgttgcggcccgtagccagtggcaactggcaaagcacactgaacagcatcgtgggtctgggggtgcaatccctgaagcgccgacgatgcttctgatagctaacgtgtcgtatgtgtgtcatgtatgcgtccatgtcgccgccagaggagctgctgagccgccgcgcgcccgctttccaagatggctaccccttcgatgatgccgcagtggtcttacatgcacatctcgggccaggacgcctcggagtacctgagccccgggctggtgcagtttgcccgcgccaccgagacgtacttcagcctgaataacaagtttagaaaccccacggtggcgcctacgcacgacgtgaccacagaccggtcccagcgtttgacgctgcggttcatccctgtggaccgtgaggatactgcgtactcgtacaaggcgcggttcaccctagctgtgggtgataaccgtgtgctggacatggcttccacgtactttgacatccgcggcgtgctggacaggggccctacttttaagccctactctggcactgcctacaacgccctggctcccaagggtgccccaaatccttgcgaatgggatgaagctgctactgctcttgaaataaacctagaagaagaggacgatgacaacgaagacgaagtagacgagcaagctgagcagcaaaaaactcacgtatttgggcaggcgccttattctggtataaatattacaaaggagggtattcaaataggtgtcgaaggtcaaacacctaaatatgccgataaaacatttcaacctgaacctcaaataggagaatctcagtggtacgaaacagaaattaatcatgcagctgggagagtcctaaaaaagactaccccaatgaaaccatgttacggttcatatgcaaaacccacaaatgaaaatggagggcaaggcattcttgtaaagcaacaaaatggaaagctagaaagtcaagtggaaatgcaatttttctcaactactgaggcagccgcaggcaatggtgataacttgactcctaaagtggtattgtacagtgaagatgtagatatagaaaccccagacactcatatttcttacatgcccactattaaggaaggtaactcacgagaactaatgggccaacaatctatgcccaacaggcctaattacattgcttttagggacaattttattggtctaatgtattacaacagcacgggtaatatgggtgttctggcgggccaagcatcgcagttgaatgctgttgtagatttgcaagacagaaacacagagctttcataccagcttttgcttgattccattggtgatagaaccaggtacttttctatgtggaatcaggctgttgacagctatgatccagatgttagaattattgaaaatcatggaactgaagatgaacttccaaattactgctttccactgggaggtgtgattaatacagagactcttaccaaggtaaaacctaaaacaggtcaggaaaatggatgggaaaaagatgctacagaattttcagataaaaatgaaataagagttggaaataattttgccatggaaatcaatctaaatgccaacctgtggagaaatttcctgtactccaacatagcgctgtatttgcccgacaagctaaagtacagtccttccaacgtaaaaatttctgataacccaaacacctacgactacatgaacaagcgagtggtggctcccgggctagtggactgctacattaaccttggagcacgctggtcccttgactatatggacaacgtcaacccatttaaccaccaccgcaatgctggcctgcgctaccgctcaatgttgctgggcaatggtcgctatgtgcccttccacatccaggtgcctcagaagttctttgccattaaaaacctccttctcctgccgggctcatacacctacgagtggaacttcaggaaggatgttaacatggttctgcagagctccctaggaaatgacctaagggttgacggagccagcattaagtttgatagcatttgcctttacgccaccttcttccccatggcccacaacaccgcctccacgcttgaggccatgcttagaaacgacaccaacgaccagtcctttaacgactatctctccgccgccaacatgctctaccctatacccgccaacgctaccaacgtgcccatatccatcccctcccgcaactgggcggctttccgcggctgggccttcacgcgccttaagactaaggaaaccccatcactgggctcgggctacgacccttattacacctactctggctctataccctacctagatggaaccttttacctcaaccacacctttaagaaggtggccattacctttgactcttctgtcagctggcctggcaatgaccgcctgcttacccccaacgagtttgaaattaagcgctcagttgacggggagggttacaacgttgcccagtgtaacatgaccaaagactggttcctggtacaaatgctagctaactataacattggctaccagggcttctatatcccagagagctacaaggaccgcatgtactccttctttagaaacttccagcccatgagccgtcaggtggtggatgatactaaatacaaggactaccaacaggtgggcatcctacaccaacacaacaactctggatttgttggctaccttgcccccaccatgcgcgaaggacaggcctaccctgctaacttcccctatccgcttataggcaagaccgcagttgacagcattacccagaaaaagtttctttgcgatcgcaccctttggcgcatcccattctccagtaactttatgtccatgggcgcactcacagacctgggccaaaaccttctctacgccaactccgcccacgcgctagacatgacttttgaggtggatcccatggacgagcccacccttctttatgttttgtttgaagtctttgacgtggtccgtgtgcaccagccgcaccgcggcgtcatcgaaaccgtgtacctgcgcacgcccttctcggccggcaacgccacaacataaagaagcaagcaacatcaacaacagctgccgccatgggctccagtgagcaggaactgaaagccattgtcaaagatcttggttgtgggccatattttttgggcacctatgacaagcgctttccaggctttgtttctccacacaagctcgcctgcgccatagtcaatacggccggtcgcgagactgggggcgtacactggatggcctttgcctggaacccgcactcaaaaacatgctacctctttgagccctttggcttttctgaccagcgactcaagcaggtttaccagtttgagtacgagtcactcctgcgccgtagcgccattgcttcttcccccgaccgctgtataacgctggaaaagtccacccaaagcgtacaggggcccaactcggccgcctgtggactattctgctgcatgtttctccacgcctttgccaactggccccaaactcccatggatcacaaccccaccatgaaccttattaccggggtacccaactccatgctcaacagtccccaggtacagcccaccctgcgtcgcaaccaggaacagctctacagcttcctggagcgccactcgccctacttccgcagccacagtgcgcagattaggagcgccacttctttttgtcacttgaaaaacatgtaaaaataatgtactagagacactttcaataaaggcaaatgcttttatttgtacactctcgggtgattatttacccccacccttgccgtctgcgccgtttaaaaatcaaaggggttctgccgcgcatcgctatgcgccactggcagggacacgttgcgatactggtgtttagtgctccacttaaactcaggcacaaccatccgcggcagctcggtgaagttttcactccacaggctgcgcaccatcaccaacgcgtttagcaggtcgggcgccgatatcttgaagtcgcagttggggcctccgccctgcgcgcgcgagttgcgatacacagggttgcagcactggaacactatcagcgccgggtggtgcacgctggccagcacgctcttgtcggagatcagatccgcgtccaggtcctccgcgttgctcagggcgaacggagtcaactttggtagctgccttcccaaaaagggcgcgtgcccaggctttgagttgcactcgcaccgtagtggcatcaaaaggtgaccgtgcccggtctgggcgttaggatacagcgcctgcataaaagccttgatctgcttaaaagccacctgagcctttgcgccttcagagaagaacatgccgcaagacttgccggaaaactgattggccggacaggccgcgtcgtgcacgcagcaccttgcgtcggtgttggagatctgcaccacatttcggccccaccggttcttcacgatcttggccttgctagactgctccttcagcgcgcgctgcccgttttcgctcgtcacatccatttcaatcacgtgctccttatttatcataatgcttccgtgtagacacttaagctcgccttcgatctcagcgcagcggtgcagccacaacgcgcagcccgtgggctcgtgatgcttgtaggtcacctctgcaaacgactgcaggtacgcctgcaggaatcgccccatcatcgtcacaaaggtcttgttgctggtgaaggtcagctgcaacccgcggtgctcctcgttcagccaggtcttgcatacggccgccagagcttccacttggtcaggcagtagtttgaagttcgcctttagatcgttatccacgtggtacttgtccatcagcgcgcgcgcagcctccatgcccttctcccacgcagacacgatcggcacactcagcgggttcatcaccgtaatttcactttccgcttcgctgggctcttcctcttcctcttgcgtccgcataccacgcgccactgggtcgtcttcattcagccgccgcactgtgcgcttacctcctttgccatgcttgattagcaccggtgggttgctgaaacccaccatttgtagcgccacatcttctctttcttcctcgctgtccacgattacctctggtgatggcgggcgctcgggcttgggagaagggcgcttctttttcttcttgggcgcaatggccaaatccgccgccgaggtcgatggccgcgggctgggtgtgcgcggcaccagcgcgtcttgtgatgagtcttcctcgtcctcggactcgatacgccgcctcatccgcttttttgggggcgcccggggaggcggcggcgacggggacggggacgacacgtcctccatggttgggggacgtcgcgccgcaccgcgtccgcgctcgggggtggtttcgcgctgctcctcttcccgactggccatttccttctcctataggcagaaaaagatcatggagtcagtcgagaagaaggacagcctaaccgccccctctgagttcgccaccaccgcctccaccgatgccgccaacgcgcctaccaccttccccgtcgaggcacccccgcttgaggaggaggaagtgattatcgagcaggacccaggttttgtaagcgaagacgacgaggaccgctcagtaccaacagaggataaaaagcaagaccaggacaacgcagaggcaaacgaggaacaagtcgggcggggggacgaaaggcatggcgactacctagatgtgggagacgacgtgctgttgaagcatctgcagcgccagtgcgccattatctgcgacgcgttgcaagagcgcagcgatgtgcccctcgccatagcggatgtcagccttgcctacgaacgccacctattctcaccgcgcgtaccccccaaacgccaagaaaacggcacatgcgagcccaacccgcgcctcaacttctaccccgtatttgccgtgccagaggtgcttgccacctatcacatctttttccaaaactgcaagatacccctatcctgccgtgccaaccgcagccgagcggacaagcagctggccttgcggcagggcgctgtcatacctgatatcgcctcgctcaacgaagtgccaaaaatctttgagggtcttggacgcgacgagaagcgcgcggcaaacgctctgcaacaggaaaacagcgaaaatgaaagtcactctggagtgttggtggaactcgagggtgacaacgcgcgcctagccgtactaaaacgcagcatcgaggtcacccactttgcctacccggcacttaacctaccccccaaggtcatgagcacagtcatgagtgagctgatcgtgcgccgtgcgcagcccctggagagggatgcaaatttgcaagaacaaacagaggagggcctacccgcagttggcgacgagcagctagcgcgctggcttcaaacgcgcgagcctgccgacttggaggagcgacgcaaactaatgatggccgcagtgctcgttaccgtggagcttgagtgcatgcagcggttctttgctgacccggagatgcagcgcaagctagaggaaacattgcactacacctttcgacagggctacgtacgccaggcctgcaagatctccaacgtggagctctgcaacctggtctcctaccttggaattttgcacgaaaaccgccttgggcaaaacgtgcttcattccacgctcaagggcgaggcgcgccgcgactacgtccgcgactgcgtttacttatttctatgctacacctggcagacggccatgggcgtttggcagcagtgcttggaggagtgcaacctcaaggagctgcagaaactgctaaagcaaaacttgaaggacctatggacggccttcaacgagcgctccgtggccgcgcacctggcggacatcattttccccgaacgcctgcttaaaaccctgcaacagggtctgccagacttcaccagtcaaagcatgttgcagaactttaggaactttatcctagagcgctcaggaatcttgcccgccacctgctgtgcacttcctagcgactttgtgcccattaagtaccgcgaatgccctccgccgctttggggccactgctaccttctgcagctagccaactaccttgcctaccactctgacataatggaagacgtgagcggtgacggtctactggagtgtcactgtcgctgcaacctatgcaccccgcaccgctccctggtttgcaattcgcagctgcttaacgaaagtcaaattatcggtacctttgagctgcagggtccctcgcctgacgaaaagtccgcggctccggggttgaaactcactccggggctgtggacgtcggcttaccttcgcaaatttgtacctgaggactaccacgcccacgagattaggttctacgaagaccaatcccgcccgcctaatgcggagcttaccgcctgcgtcattacccagggccacattcttggccaattgcaagccatcaacaaagcccgccaagagtttctgctacgaaagggacggggggtttacttggacccccagtccggcgaggagctcaacccaatccccccgccgccgcagccctatcagcagcagccgcgggcccttgcttcccaggatggcacccaaaaagaagctgcagctgccgccgccacccacggacgaggaggaatactgggacagtcaggcagaggaggttttggacgaggaggaggaggacatgatggaagactgggagagcctagacgaggaagcttccgaggtcgaagaggtgtcagacgaaacaccgtcaccctcggtcgcattcccctcgccggcgccccagaaatcggcaaccggttccagcatggctacaacctccgctcctcaggcgccgccggcactgcccgttcgccgacccaaccgtagatgggacaccactggaaccagggccggtaagtccaagcagccgccgccgttagcccaagagcaacaacagcgccaaggctaccgctcatggcgcgggcacaagaacgccatagttgcttgcttgcaagactgtgggggcaacatctccttcgcccgccgctttcttctctaccatcacggcgtggccttcccccgtaacatcctgcattactaccgtcatctctacagcccatactgcaccggcggcagcggcagcaacagcagcggccacacagaagcaaaggcgaccggatagcaagactctgacaaagcccaagaaatccacagcggcggcagcagcaggaggaggagcgctgcgtctggcgcccaacgaacccgtatcgacccgcgagcttagaaacaggatttttcccactctgtatgctatatttcaacagagcaggggccaagaacaagagctgaaaataaaaaacaggtctctgcgatccctcacccgcagctgcctgtatcacaaaagcgaagatcagcttcggcgcacgctggaagacgcggaggctctcttcagtaaatactgcgcgctgactcttaaggactagtttcgcgccctttctcaaatttaagcgcgaaaactacgtcatctccagcggccacacccggcgccagcacctgttgtcagcgccattatgagcaaggaaattcccacgccctacatgtggagttaccagccacaaatgggacttgcggctggagctgcccaagactactcaacccgaataaactacatgagcgcgggaccccacatgatatcccgggtcaacggaatacgcgcccaccgaaaccgaattctcctggaacaggcggctattaccaccacacctcgtaataaccttaatccccgtagttggcccgctgccctggtgtaccaggaaagtcccgctcccaccactgtggtacttcccagagacgcccaggccgaagttcagatgactaactcaggggcgcagcttgcgggcggctttcgtcacagggtgcggtcgcccgggcagggtataactcacctgacaatcagagggcgaggtattcagctcaacgacgagtcggtgagctcctcgcttggtctccgtccggacgggacatttcagatcggcggcgccggccgctcttcattcacgcctcgtcaggcaatcctaactctgcagacctcgtcctctgagccgcgctctggaggcattggaactctgcaatttattgaggagtttgtgccatcggtctactttaaccccttctcgggacctcccggccactatccggatcaatttattcctaactttgacgcggtaaaggactcggcggacggctacgactgaatgttaagtggagaggcagagcaactgcgcctgaaacacctggtccactgtcgccgccacaagtgctttgcccgcgactccggtgagttttgctactttgaattgcccgaggatcatatcgagggcccggcgcacggcgtccggcttaccgcccagggagagcttgcccgtagcctgattcgggagtttacccagcgccccctgctagttgagcgggacaggggaccctgtgttctcactgtgatttgcaactgtcctaaccctggattacatcaagatcctctagttaatgtcaggtcgcctaagtcgattaactagagtacccggggatcttattccctttaactaataaaaaaaaataataaagcatcacttacttaaaatcagttagcaaatttctgtccagtttattcagcagcacctccttgccctcctcccagctctggtattgcagcttcctcctggctgcaaactttctccacaatctaaatggaatgtcagtttcctcctgttcctgtccatccgcacccactatcttcatgttgttgcagatgaagcgcgcaagaccgtctgaagataccttcaaccccgtgtatccatatgacacggaaaccggtcctccaactgtgccttttcttactcctccctttgtatcccccaatgggtttcaagagagtccccctggggtactctctttgcgcctatccgaacctctagttacctccaatggcatgcttgcgctcaaaatgggcaacggcctctctctggacgaggccggcaaccttacctcccaaaatgtaaccactgtgagcccacctctcaaaaaaaccaagtcaaacataaacctggaaatatctgcacccctcacagttacctcagaagccctaactgtggctgccgccgcacctctaatggtcgcgggcaacacactcaccatgcaatcacaggccccgctaaccgtgcacgactccaaacttagcattgccacccaaggacccctcacagtgtcagaaggaaagctagccctgcaaacatcaggccccctcaccaccaccgatagcagtacccttactatcactgcctcaccccctctaactactgccactggtagcttgggcattgacttgaaagagcccatttatacacaaaatggaaaactaggactaaagtacggggctcctttgcatgtaacagacgacctaaacactttgaccgtagcaactggtccaggtgtgactattaataatacttccttgcaaactaaagttactggagccttgggttttgattcacaaggcaatatgcaacttaatgtagcaggaggactaaggattgattctcaaaacagacgccttatacttgatgttagttatccgtttgatgctcaaaaccaactaaatctaagactaggacagggccctctttttataaactcagcccacaacttggatattaactacaacaaaggcctttacttgtttacagcttcaaacaattccaaaaagcttgaggttaacctaagcactgccaaggggttgatgtttgacgctacagccatagccattaatgcaggagatgggcttgaatttggttcacctaatgcaccaaacacaaatcccctcaaaacaaaaattggccatggcctagaatttgattcaaacaaggctatggttcctaaactaggaactggccttagttttgacagcacaggtgccattacagtaggaaacaaaaataatgataagctaactttgtggaccggaataaaccctccacctaactgtcaaattgtggaaaacactaatacaaatgatggcaaacttactttagtattagtaaaaaatggagggcttgttaatggctacgtgtctctagttggtgtatcagacactgtgaaccaaatgttcacacaaaagacagcaaacatccaattaagattatattttgactcttctggaaatctattaactgaggaatcagacttaaaaattccacttaaaaataaatcttctacagcgaccagtgaaactgtagccagcagcaaagcctttatgccaagtactacagcttatcccttcaacaccactactagggatagtgaaaactacattcatggaatatgttactacatgactagttatgatagaagtctatttcccttgaacatttctataatgctaaacagccgtatgatttcttccaatgttgcctatgccatacaatttgaatggaatctaaatgcaagtgaatctccagaaagcaacatagctacgctgaccacatccccctttttcttttcttacattacagaagacgacaactaaagaatcgtttgtgttatgtttcaacgtgtttatttttcaattgcagaaaatttcaagtcatttttcattcagtagtatagccccaccaccacatagcttatacagatcaccgtaccttaatcaaactcacagaaccctagtattcaacctgccacctccctcccaacacacagagtacacagtcctttctccccggctggccttaaaaagcatcatatcatgggtaacagacatattcttaggtgttatattccacacggtttcctgtcgagccaaacgctcatcagtgatattaataaactccccgggcagctcacttaagttcatgtcgctgtccagctgctgagccacaggctgctgtccaacttgcggttgcttaacgggcggcgaaggagaagtccacgctcagtgctgcagcagcgcgcgaataaactgctgccgccgccgctccgtcctgcaggaatacaacatggcagtggtctcctcagcgatgattcgcaccgcccgcagcataaggcgccttgtcctccgggcacagcagcgcaccctgatctcacttaaatcagcacagtaactgcagcacagcaccacaatattgttcaaaatcccacagtgcaaggcgctgtatccaaagctcatggcggggaccacagaacccacgtggccatcataccacaagcgcaggtagattaagtggcgacccctcataaacacgctggacataaacattacctcttttggcatgttgtaattcaccacctcccggtaccatataaacctctgattaaacatggcgccatccaccaccatcctaaaccagctggccaaaacctgcccgccggctatacactgcagggaaccgggactggaacaatgacagtggagagcccaggactcgtaaccatggatcatcatgctcgtcatgatatcaatgttggcacaacacaggcacacgtgcatacacttcctcaggattacaagctcctcccgcgttagaaccatatcccagggaacaacccattcctgaatcagcgtaaatcccacactgcagggaagacctcgcacgtaactcacgttgtgcattgtcaaagtgttacattcgggcagcagcggatgatcctccagtatggtagcgcgggtttctgtctcaaaaggaggtagacgatccctactgtacggagtgcgccgagacaaccgagatcgtgttggtcgtagtgtcatgccaaatggaacgccggacgtagtcatatttcctgaagcaaaaccaggtgcgggcgtgacaaacagatctgcgtctccggtctcgccgcttagatcgctctgtgtagtagttgtagtatatccactctctcaaagcatccaggcgccccctggcttcgggttctatgtaaactccttcatgcgccgctgccctgataacatccaccaccgcagaataagccacacccagccaacctacacattcgttctgcgagtcacacacgggaggagcgggaagagctggaagaaccatgtttttttttttattccaaaagattatccaaaacctcaaaatgaagatctattaagtgaacgcgctcccctccggtggcgtggtcaaactctacagccaaagaacagataatggcatttgtaagatgttgcacaatggcttccaaaaggcaaacggccctcacgtccaagtggacgtaaaggctaaacccttcagggtgaatctcctctataaacattccagcaccttcaaccatgcccaaataattctcatctcgccaccttctcaatatatctctaagcaaatcccgaatattaagtccggccattgtaaaaatctgctccagagcgccctccaccttcagcctcaagcagcgaatcatgattgcaaaaattcaggttcctcacagacctgtataagattcaaaagcggaacattaacaaaaataccgcgatcccgtaggtcccttcgcagggccagctgaacataatcgtgcaggtctgcacggaccagcgcggccacttccccgccaggaaccatgacaaaagaacccacactgattatgacacgcatactcggagctatgctaaccagcgtagccccgatgtaagcttgttgcatgggcggcgatataaaatgcaaggtgctgctcaaaaaatcaggcaaagcctcgcgcaaaaaagaaagcacatcgtagtcatgctcatgcagataaaggcaggtaagctccggaaccaccacagaaaaagacaccatttttctctcaaacatgtctgcgggtttctgcataaacacaaaataaaataacaaaaaaacatttaaacattagaagcctgtcttacaacaggaaaaacaacccttataagcataagacggactacggccatgccggcgtgaccgtaaaaaaactggtcaccgtgattaaaaagcaccaccgacagctcctcggtcatgtccggagtcataatgtaagactcggtaaacacatcaggttgattcacatcggtcagtgctaaaaagcgaccgaaatagcccgggggaatacatacccgcaggcgtagagacaacattacagcccccataggaggtataacaaaattaataggagagaaaaacacataaacacctgaaaaaccctcctgcctaggcaaaatagcaccctcccgctccagaacaacatacagcgcttccacagcggcagccataacagtcagccttaccagtaaaaaagaaaacctattaaaaaaacaccactcgacacggcaccagctcaatcagtcacagtgtaaaaaagggccaagtgcagagcgagtatatataggactaaaaaatgacgtaacggttaaagtccacaaaaaacacccagaaaaccgcacgcgaacctacgcccagaaacgaaagccaaaaaacccacaacttcctcaaatcgtcacttccgttttcccacgttacgtcacttcccattttaagaaaactacaattcccaacacatacaagttactccgccctaaaacctacgtcacccgccccgttcccacgccccgcgccacgtcacaaactccaccccctcattatcatattggcttcaatccaaaataaggtatattattgatgatg

SEQ ID NO: 37 - DNA, 36380 bp, Artificial Sequence
  Adk35F2-Spike/E4orf6(mPGK)-E4dl-57(E4re#35)
ttaattaacatcatcaataatataccttattttggattgaagccaatatgataatgagggggtggagtttgtgacgtggcgcggggcgtgggaacggggcgggtgacgtagtagtgtggcggaagtgtgatgttgcaagtgtggcggaacacatgtaagcgacggatgtggcaaaagtgacgtttttggtgtgcgccggtgtacacaggaagtgacaattttcgcgcggttttaggcggatgttgtagtaaatttgggcgtaaccgagtaagatttggccattttcgcgggaaaactgaataagaggaagtgaaatctgaataattttgtgttactcatagcgcgtaataatttctgtaatagtaatcaattacggggtcattagttcatagcccatatatggagttccgcgttacataacttacggtaaatggcccgcctggctgaccgcccaacgacccccgcccattgacgtcaataatgacgtatgttcccatagtaacgccaatagggactttccattgacgtcaatgggtggagtatttacggtaaactgcccacttggcagtacatcaagtgtatcatatgccaagtacgccccctattgacgtcaatgacggtaaatggcccgcctggcattatgcccagtacatgaccttatgggactttcctacttggcagtacatctacgtattagtcatcgctattaccatggtgatgcggttttggcagtacatcaatgggcgtggatagcggtttgactcacggggatttccaagtctccaccccattgacgtcaatgggagtttgttttggcaccaaaatcaacgggactttccaaaatgtcgtaacaactccgccccattgacgcaaatgggcggtaggcgtgtacggtgggaggtctatataagcagagctctccctatcagtgatagagatctccctatcagtgatagagatcgtcgacgagctcgtttagtgaaccgtcagatcgcctggagacgccatccacgctgttttgacctccatagaagacaccgggaccgatccagcctccgatttgccaccatgtttgtgttcctggtgctgctgccactggtgtccagccagtgtgtgaacctgaccaccaggacccaacttcctcctgcctacaccaactccttcaccaggggagtctactaccctgacaaggtgttcaggtcctctgtgctgcacagcacccaggacctgttcctgccattcttcagcaatgtgacctggttccatgccatccatgtgtctggcaccaatggcaccaagaggtttgacaaccctgtgctgccattcaatgatggagtctactttgccagcacagagaagagcaacatcatcaggggctggatttttggcaccaccctggacagcaagacccagtccctgctgattgtgaacaatgccaccaatgtggtgattaaggtgtgtgagttccagttctgtaatgacccattcctgggagtctactaccacaagaacaacaagtcctggatggagtctgagttcagggtctactcctctgccaacaactgtacctttgaatatgtgagccaaccattcctgatggacttggagggcaagcagggcaacttcaagaacctgagggagtttgtgttcaagaacattgatggctacttcaagatttacagcaaacacacaccaatcaacctggtgagggacctgccacagggcttctctgccttggaaccactggtggacctgccaattggcatcaacatcaccaggttccagaccctgctggctctgcacaggtcctacctgacacctggagactcctcctctggctggacagcaggagcagcagcctactatgtgggctacctccaaccaaggaccttcctgctgaaatacaatgagaatggcaccatcacagatgctgtggactgtgccctggacccactgtctgagaccaagtgtaccctgaaatccttcacagtggagaagggcatctaccagaccagcaacttcagggtccaaccaacagagagcattgtgaggtttccaaacatcaccaacctgtgtccatttggagaggtgttcaatgccaccaggtttgcctctgtctatgcctggaacaggaagaggattagcaactgtgtggctgactactctgtgctctacaactctgcctccttcagcaccttcaagtgttatggagtgagcccaaccaaactgaatgacctgtgtttcaccaatgtctatgctgactcctttgtgattaggggagatgaggtgagacagattgcccctggacaaacaggcaagattgctgactacaactacaaactgcctgatgacttcacaggctgtgtgattgcctggaacagcaacaacctggacagcaaggtgggaggcaactacaactacctctacagactgttcaggaagagcaacctgaaaccatttgagagggacatcagcacagagatttaccaggctggcagcacaccatgtaatggagtggagggcttcaactgttactttccactccaatcctatggcttccaaccaaccaatggagtgggctaccaaccatacagggtggtggtgctgtcctttgaactgctccatgcccctgccacagtgtgtggaccaaagaagagcaccaacctggtgaagaacaagtgtgtgaacttcaacttcaatggactgacaggcacaggagtgctgacagagagcaacaagaagttcctgccattccaacagtttggcagggacattgctgacaccacagatgctgtgagggacccacagaccttggagattctggacatcacaccatgttcctttggaggagtgtctgtgattacacctggcaccaacaccagcaaccaggtggctgtgctctaccaggatgtgaactgtactgaggtgcctgtggctatccatgctgaccaacttacaccaacctggagggtctacagcacaggcagcaatgtgttccagaccagggctggctgtctgattggagcagagcatgtgaacaactcctatgagtgtgacatcccaattggagcaggcatctgtgcctcctaccagacccagaccggtggcggtgggtcgaggtctgtggcaagccagagcatcattgcctacacaatgagtctgggagcagagaactctgtggcttacagcaacaacagcattgccatcccaaccaacttcaccatctctgtgaccacagagattctgcctgtgagtatgaccaagacctctgtggactgtacaatgtatatctgtggagacagcacagagtgtagcaacctgctgctccaatatggctccttctgtacccaacttaacagggctctgacaggcattgctgtggaacaggacaagaacacccaggaggtgtttgcccaggtgaagcagatttacaagacacctccaatcaaggactttggaggcttcaacttcagccagattctgcctgacccaagcaagccaagcaagaggtccttcattgaggacctgctgttcaacaaggtgaccctggctgatgctggcttcatcaagcaatatggagactgtctgggagacattgctgccagggacctgatttgtgcccagaagttcaatggactgacagtgctgcctccactgctgacagatgagatgattgcccaatacacctctgccctgctggctggcaccatcacctctggctggacctttggagcaggagcagccctccaaatcccatttgctatgcagatggcttacaggttcaatggcattggagtgacccagaatgtgctctatgagaaccagaaactgattgccaaccagttcaactctgccattggcaagattcaggactccctgtccagcacagcctctgccctgggcaaactccaagatgtggtgaaccagaatgcccaggctctgaacaccctggtgaagcaactttccagcaactttggagccatctcctctgtgctgaatgacatcctgagcagactggacaaggtggaggctgaggtccagattgacagactgattacaggcagactccaatccctccaaacctatgtgacccaacaacttatcagggctgctgagattagggcatctgccaacctggctgccaccaagatgagtgagtgtgtgctgggacaaagcaagagggtggacttctgtggcaagggctaccacctgatgagttttccacagtctgcccctcatggagtggtgttcctgcatgtgacctatgtgcctgcccaggagaagaacttcaccacagcccctgccatctgccatgatggcaaggctcactttccaagggagggagtgtttgtgagcaatggcacccactggtttgtgacccagaggaacttctatgaaccacagattatcaccacagacaacacctttgtgtctggcaactgtgatgtggtgattggcattgtgaacaacacagtctatgacccactccaacctgaactggactccttcaaggaggaactggacaaatacttcaagaaccacaccagccctgatgtggacctgggagacatctctggcatcaatgcctctgtggtgaacatccagaaggagattgacagactgaatgaggtggctaagaacctgaatgagtccctgattgacctccaagaactgggcaaatatgaacaatacatcaagtggccatgaaaattgatcataatcagccataccacatttgtagaggttttacttgctttaaaaaacctcccacacctccccctgaacctgaaacataaaatgaatgcaattgttgttgttaacttgtttattgcagcttataatggttacaaataaagcaatagcatcacaaatttcacaaataaagcatttttttcactgcattctagttgtggtttgtccaaactcatcaatgtatcttaacgcggatcgggtaggggaggcgcttttcccaaggcagtctggagcatgcgctttagcagccccgctgggcacttggcgctacacaagtggcctctggcctcgcacacattccacatccaccggtaggcgccaaccggctccgttctttggtggccccttcgcgccaccttctactcctcccctagtcaggaagttcccccccgccccgcagctcgcgtcgtgcaggacgtgacaaatggaagtagcacgtctcactagtctcgtgcagatggacagcaccgctgagcaatggaagcgggtaggcctttggggcagcggccaatagcagctttgctccttcgctttctgggctcagaggctgggaaggggtgggtccgggggcgggctcaggggcgggctcaggggcggggcgggcgcccgaaggtcctccggaggcccggcattctgcacgcttcaaaagcgcacgtctgccgcgctgttctcctcttcctcatctccgggcctttcgaaactaccccaagctggccaccatgactacgtccggcgttccatttggcatgacactacgaccaacacgatctcggttgtctcggcgcactccgtacagtagggatcgtctacctccttttgagacagaaacccgcgctaccatactggaggatcatccgctgctgcccgaatgtaacactttgacaatgcacaacgtgagttacgtgcgaggtcttccctgcagtgtgggatttacgctgattcaggaatgggttgttccctgggatatggttctaacgcgggaggagcttgtaatcctgaggaagtgtatgcacgtgtgcctgtgttgtgccaacattgatatcatgacgagcatgatgatccatggttacgagtcctgggctctccactgtcattgttccagtcccggttccctgcagtgtatagccggcgggcaggttttggccagctggtttaggatggtggtggatggcgccatgtttaatcagaggtttatatggtaccgggaggtggtgaattacaacatgccaaaagaggtaatgtttatgtccagcgtgtttatgaggggtcgccacttaatctacctgcgcttgtggtatgatggccacgtgggttctgtggtccccgccatgagctttggatacagcgccttgcactgtgggattttgaacaatattgtggtgctgtgctgcagttactgtgctgatttaagtgagatcagggtgcgctgctgtgcccggaggacaaggcgccttatgctgcgggcggtgcgaatcatcgctgaggagaccactgccatgttgtattcctgcaggacggagcggcggcggcagcagtttattcgcgcgctgctgcagcaccaccgccctatcctgatgcacgattatgactctacccccatgtagaagcttggggatcaattctctagagctcgctgatcagcctcgactgtgccttctagttgccagccatctgttgtttgcccctcccccgtgccttccttgaccctggaaggtgccactcccactgtcctttcctaataaaatgaggaaattgcatcgcattgtctgagtaggtgtcattctattctggggggtggggtggggcaggacagcaagggggaggattgggaagacaatagcaggcatgctggggatgcggtgggctctatggcttctgaggaaattgggcgtggcttaagggtgggaaagaatatataaggtgggggtcttatgtagttttgtatctgttttgcagcagccgccgccgccatgagcaccaactcgtttgatggaagcattgtgagctcatatttgacaacgcgcatgcccccatgggccggggtgcgtcagaatgtgatgggctccagcattgatggtcgccccgtcctgcccgcaaactctactaccttgacctacgagaccgtgtctggaacgccgttggagactgcagcctccgccgccgcttcagccgctgcagccaccgcccgcgggattgtgactgactttgctttcctgagcccgcttgcaagcagtgcagcttcccgttcatccgcccgcgatgacaagttgacggctcttttggcacaattggattctttgacccgggaacttaatgtcgtttctcagcagctgttggatctgcgccagcaggtttctgccctgaaggcttcctcccctcccaatgcggtttaaaacataaataaaaaaccagactctgtttggatttggatcaagcaagtgtcttgctgtctttatttaggggttttgcgcgcgcggtaggcccgggaccagcggtctcggtcgttgagggtcctgtgtattttttccaggacgtggtaaaggtgactctggatgttcagatacatgggcataagcccgtctctggggtggaggtagcaccactgcagagcttcatgctgcggggtggtgttgtagatgatccagtcgtagcaggagcgctgggcgtggtgcctaaaaatgtctttcagtagcaagctgattgccaggggcaggcccttggtgtaagtgtttacaaagcggttaagctgggatgggtgcatacgtggggatatgagatgcatcttggactgtatttttaggttggctatgttcccagccatatccctccggggattcatgttgtgcagaaccaccagcacagtgtatccggtgcacttgggaaatttgtcatgtagcttagaaggaaatgcgtggaagaacttggagacgcccttgtgacctccaagattttccatgcattcgtccataatgatggcaatgggcccacgggcggcggcctgggcgaagatatttctgggatcactaacgtcatagttgtgttccaggatgagatcgtcataggccatttttacaaagcgcgggcggagggtgccagactgcggtataatggttccatccggcccaggggcgtagttaccctcacagatttgcatttcccacgctttgagttcagatggggggatcatgtctacctgcggggcgatgaagaaaacggtttccggggtaggggagatcagctgggaagaaagcaggttcctgagcagctgcgacttaccgcagccggtgggcccgtaaatcacacctattaccggctgcaactggtagttaagagagctgcagctgccgtcatccctgagcaggggggccacttcgttaagcatgtccctgactcgcatgttttccctgaccaaatccgccagaaggcgctcgccgcccagcgatagcagttcttgcaaggaagcaaagtttttcaacggtttgagaccgtccgccgtaggcatgcttttgagcgtttgaccaagcagttccaggcggtcccacagctcggtcacctgctctacggcatctcgatccagcatatctcctcgtttcgcgggttggggcggctttcgctgtacggcagtagtcggtgctcgtccagacgggccagggtcatgtctttccacgggcgcagggtcctcgtcagcgtagtctgggtcacggtgaaggggtgcgctccgggctgcgcgctggccagggtgcgcttgaggctggtcctgctggtgctgaagcgctgccggtcttcgccctgcgcgtcggccaggtagcatttgaccatggtgtcatagtccagcccctccgcggcgtggcccttggcgcgcagcttgcccttggaggaggcgccgcacgaggggcagtgcagacttttgagggcgtagagcttgggcgcgagaaataccgattccggggagtaggcatccgcgccgcaggccccgcagacggtctcgcattccacgagccaggtgagctctggccgttcggggtcaaaaaccaggtttcccccatgctttttgatgcgtttcttacctctggtttccatgagccggtgtccacgctcggtgacgaaaaggctgtccgtgtccccgtatacagacttgagaggcctgtcctcgagcggtgttccgcggtcctcctcgtatagaaactcggaccactctgagacaaaggctcgcgtccaggccagcacgaaggaggctaagtgggaggggtagcggtcgttgtccactagggggtccactcgctccagggtgtgaagacacatgtcgccctcttcggcatcaaggaaggtgattggtttgtaggtgtaggccacgtgaccgggtgttcctgaaggggggctataaaagggggtgggggcgcgttcgtcctcactctcttccgcatcgctgtctgcgagggccagctgttggggtgagtactccctctgaaaagcgggcatgacttctgcgctaagattgtcagtttccaaaaacgaggaggatttgatattcacctggcccgcggtgatgcctttgagggtggccgcatccatctggtcagaaaagacaatctttttgttgtcaagcttggtggcaaacgacccgtagagggcgttggacagcaacttggcgatggagcgcagggtttggtttttgtcgcgatcggcgcgctccttggccgcgatgtttagctgcacgtattcgcgcgcaacgcaccgccattcgggaaagacggtggtgcgctcgtcgggcaccaggtgcacgcgccaaccgcggttgtgcagggtgacaaggtcaacgctggtggctacctctccgcgtaggcgctcgttggtccagcagaggcggccgcccttgcgcgagcagaatggcggtagggggtctagctgcgtctcgtccggggggtctgcgtccacggtaaagaccccgggcagcaggcgcgcgtcgaagtagtctatcttgcatccttgcaagtctagcgcctgctgccatgcgcgggcggcaagcgcgcgctcgtatgggttgagtgggggaccccatggcatggggtgggtgagcgcggaggcgtacatgccgcaaatgtcgtaaacgtagaggggctctctgagtattccaagatatgtagggtagcatcttccaccgcggatgctggcgcgcacgtaatcgtatagttcgtgcgagggagcgaggaggtcgggaccgaggttgctacgggcgggctgctctgctcggaagactatctgcctgaagatggcatgtgagttggatgatatggttggacgctggaagacgttgaagctggcgtctgtgagacctaccgcgtcacgcacgaaggaggcgtaggagtcgcgcagcttgttgaccagctcggcggtgacctgcacgtctagggcgcagtagtccagggtttccttgatgatgtcatacttatcctgtcccttttttttccacagctcgcggttgaggacaaactcttcgcggtctttccagtactcttggatcggaaacccgtcggcctccgaacggtaagagcctagcatgtagaactggttgacggcctggtaggcgcagcatcccttttctacgggtagcgcgtatgcctgcgcggccttccggagcgaggtgtgggtgagcgcaaaggtgtccctgaccatgactttgaggtactggtatttgaagtcagtgtcgtcgcatccgccctgctcccagagcaaaaagtccgtgcgctttttggaacgcggatttggcagggcgaaggtgacatcgttgaagagtatctttcccgcgcgaggcataaagttgcgtgtgatgcggaagggtcccggcacctcggaacggttgttaattacctgggcggcgagcacgatctcgtcaaagccgttgatgttgtggcccacaatgtaaagttccaagaagcgcgggatgcccttgatggaaggcaattttttaagttcctcgtaggtgagctcttcaggggagctgagcccgtgctctgaaagggcccagtctgcaagatgagggttggaagcgacgaatgagctccacaggtcacgggccattagcatttgcaggtggtcgcgaaaggtcctaaactggcgacctatggccattttttctggggtgatgcagtagaaggtaagcgggtcttgttcccagcggtcccatccaaggttcgcggctaggtctcgcgcggcagtcactagaggctcatctccgccgaacttcatgaccagcatgaagggcacgagctgcttcccaaaggcccccatccaagtataggtctctacatcgtaggtgacaaagagacgctcggtgcgaggatgcgagccgatcgggaagaactggatctcccgccaccaattggaggagtggctattgatgtggtgaaagtagaagtccctgcgacgggccgaacactcgtgctggcttttgtaaaaacgtgcgcagtactggcagcggtgcacgggctgtacatcctgcacgaggttgacctgacgaccgcgcacaaggaagcagagtgggaatttgagcccctcgcctggcgggtttggctggtggtcttctacttcggctgcttgtccttgaccgtctggctgctcgaggggagttacggtggatcggaccaccacgccgcgcgagcccaaagtccagatgtccgcgcgcggcggtcggagcttgatgacaacatcgcgcagatgggagctgtccatggtctggagctcccgcggcgtcaggtcaggcgggagctcctgcaggtttacctcgcatagacgggtcagggcgcgggctagatccaggtgatacctaatttccaggggctggttggtggcggcgtcgatggcttgcaagaggccgcatccccgcggcgcgactacggtaccgcgcggcgggcggtgggccgcgggggtgtccttggatgatgcatctaaaagcggtgacgcgggcgagcccccggaggtagggggggctccggacccgccgggagagggggcaggggcacgtcggcgccgcgcgcgggcaggagctggtgctgcgcgcgtaggttgctggcgaacgcgacgacgcggcggttgatctcctgaatctggcgcctctgcgtgaagacgacgggcccggtgagcttgaacctgaaagagagttcgacagaatcaatttcggtgtcgttgacggcggcctggcgcaaaatctcctgcacgtctcctgagttgtcttgataggcgatctcggccatgaactgctcgatctcttcctcctggagatctccgcgtccggctcgctccacggtggcggcgaggtcgttggaaatgcgggccatgagctgcgagaaggcgttgaggcctccctcgttccagacgcggctgtagaccacgcccccttcggcatcgcgggcgcgcatgaccacctgcgcgagattgagctccacgtgccgggcgaagacggcgtagtttcgcaggcgctgaaagaggtagttgagggtggtggcggtgtgttctgccacgaagaagtacataacccagcgtcgcaacgtggattcgttgatatcccccaaggcctcaaggcgctccatggcctcgtagaagtccacggcgaagttgaaaaactgggagttgcgcgccgacacggttaactcctcctccagaagacggatgagctcggcgacagtgtcgcgcacctcgcgctcaaaggctacaggggcctcttcttcttcttcaatctcctcttccataagggcctccccttcttcttcttctggcggcggtgggggaggggggacacggcggcgacgacggcgcaccgggaggcggtcgacaaagcgctcgatcatctccccgcggcgacggcgcatggtctcggtgacggcgcggccgttctcgcgggggcgcagttggaagacgccgcccgtcatgtcccggttatgggttggcggggggctgccatgcggcagggatacggcgctaacgatgcatctcaacaattgttgtgtaggtactccgccgccgagggacctgagcgagtccgcatcgaccggatcggaaaacctctcgagaaaggcgtctaaccagtcacagtcgcaaggtaggctgagcaccgtggcgggcggcagcgggcggcggtcggggttgtttctggcggaggtgctgctgatgatgtaattaaagtaggcggtcttgagacggcggatggtcgacagaagcaccatgtccttgggtccggcctgctgaatgcgcaggcggtcggccatgccccaggcttcgttttgacatcggcgcaggtctttgtagtagtcttgcatgagcctttctaccggcacttcttcttctccttcctcttgtcctgcatctcttgcatctatcgctgcggcggcggcggagtttggccgtaggtggcgccctcttcctcccatgcgtgtgaccccgaagcccctcatcggctgaagcagggctaggtcggcgacaacgcgctcggctaatatggcctgctgcacctgcgtgagggtagactggaagtcatccatgtccacaaagcggtggtatgcgcccgtgttgatggtgtaagtgcagttggccataacggaccagttaacggtctggtgacccggctgcgagagctcggtgtacctgagacgcgagtaagccctcgagtcaaatacgtagtcgttgcaagtccgcaccaggtactggtatcccaccaaaaagtgcggcggcggctggcggtagaggggccagcgtagggtggccggggctccgggggcgagatcttccaacataaggcgatgatatccgtagatgtacctggacatccaggtgatgccggcggcggtggtggaggcgcgcggaaagtcgcggacgcggttccagatgttgcgcagcggcaaaaagtgctccatggtcgggacgctctggccggtcaggcgcgcgcaatcgttgacgctctagcgtgcaaaaggagagcctgtaagcgggcactcttccgtggtctggtggataaattcgcaagggtatcatggcggacgaccggggttcgagccccgtatccggccgtccgccgtgatccatgcggttaccgcccgcgtgtcgaacccaggtgtgcgacgtcagacaacgggggagtgctccttttggcttccttccaggcgcggcggctgctgcgctagcttttttggccactggccgcgcgcagcgtaagcggttaggctggaaagcgaaagcattaagtggctcgctccctgtagccggagggttattttccaagggttgagtcgcgggacccccggttcgagtctcggaccggccggactgcggcgaacgggggtttgcctccccgtcatgcaagaccccgcttgcaaattcctccggaaacagggacgagccccttttttgcttttcccagatgcatccggtgctgcggcagatgcgcccccctcctcagcagcggcaagagcaagagcagcggcagacatgcagggcaccctcccctcctcctaccgcgtcaggaggggcgacatccgcggttgacgcggcagcagatggtgattacgaacccccgcggcgccgggcccggcactacctggacttggaggagggcgagggcctggcgcggctaggagcgccctctcctgagcggcacccaagggtgcagctgaagcgtgatacgcgtgaggcgtacgtgccgcggcagaacctgtttcgcgaccgcgagggagaggagcccgaggagatgcgggatcgaaagttccacgcagggcgcgagctgcggcatggcctgaatcgcgagcggttgctgcgcgaggaggactttgagcccgacgcgcgaaccgggattagtcccgcgcgcgcacacgtggcggccgccgacctggtaaccgcatacgagcagacggtgaaccaggagattaactttcaaaaaagctttaacaaccacgtgcgtacgcttgtggcgcgcgaggaggtggctataggactgatgcatctgtgggactttgtaagcgcgctggagcaaaacccaaatagcaagccgctcatggcgcagctgttccttatagtgcagcacagcagggacaacgaggcattcagggatgcgctgctaaacatagtagagcccgagggccgctggctgctcgatttgataaacatcctgcagagcatagtggtgcaggagcgcagcttgagcctggctgacaaggtggccgccatcaactattccatgcttagcctgggcaagttttacgcccgcaagatataccataccccttacgttcccatagacaaggaggtaaagatcgaggggttctacatgcgcatggcgctgaaggtgcttaccttgagcgacgacctgggcgtttatcgcaacgagcgcatccacaaggccgtgagcgtgagccggcggcgcgagctcagcgaccgcgagctgatgcacagcctgcaaagggccctggctggcacgggcagcggcgatagagaggccgagtcctactttgacgcgggcgctgacctgcgctgggccccaagccgacgcgccctggaggcagctggggccggacctgggctggcggtggcacccgcgcgcgctggcaacgtcggcggcgtggaggaatatgacgaggacgatgagtacgagccagaggacggcgagtactaagcggtgatgtttctgatcagatgatgcaagacgcaacggacccggcggtgcgggcggcgctgcagagccagccgtccggccttaactccacggacgactggcgccaggtcatggaccgcatcatgtcgctgactgcgcgcaatcctgacgcgttccggcagcagccgcaggccaaccggctctccgcaattctggaagcggtggtcccggcgcgcgcaaaccccacgcacgagaaggtgctggcgatcgtaaacgcgctggccgaaaacagggccatccggcccgacgaggccggcctggtctacgacgcgctgcttcagcgcgtggctcgttacaacagcggcaacgtgcagaccaacctggaccggctggtgggggatgtgcgcgaggccgtggcgcagcgtgagcgcgcgcagcagcagggcaacctgggctccatggttgcactaaacgccttcctgagtacacagcccgccaacgtgccgcggggacaggaggactacaccaactttgtgagcgcactgcggctaatggtgactgagacaccgcaaagtgaggtgtaccagtctgggccagactattttttccagaccagtagacaaggcctgcagaccgtaaacctgagccaggctttcaaaaacttgcaggggctgtggggggtgcgggctcccacaggcgaccgcgcgaccgtgtctagcttgctgacgcccaactcgcgcctgttgctgctgctaatagcgcccttcacggacagtggcagcgtgtcccgggacacatacctaggtcacttgctgacactgtaccgcgaggccataggtcaggcgcatgtggacgagcatactttccaggagattacaagtgtcagccgcgcgctggggcaggaggacacgggcagcctggaggcaaccctaaactacctgctgaccaaccggcggcagaagatcccctcgttgcacagtttaaacagcgaggaggagcgcattttgcgctacgtgcagcagagcgtgagccttaacctgatgcgcgacggggtaacgcccagcgtggcgctggacatgaccgcgcgcaacatggaaccgggcatgtatgcctcaaaccggccgtttatcaaccgcctaatggactacttgcatcgcgcggccgccgtgaaccccgagtatttcaccaatgccatcttgaacccgcactggctaccgccccctggtttctacaccgggggattcgaggtgcccgagggtaacgatggattcctctgggacgacatagacgacagcgtgttttccccgcaaccgcagaccctgctagagttgcaacagcgcgagcaggcagaggcggcgctgcgaaaggaaagcttccgcaggccaagcagcttgtccgatctaggcgctgcggccccgcggtcagatgctagtagcccatttccaagcttgatagggtctcttaccagcactcgcaccacccgcccgcgcctgctgggcgaggaggagtacctaaacaactcgctgctgcagccgcagcgcgaaaaaaacctgcctccggcatttcccaacaacgggatagagagcctagtggacaagatgagtagatggaagacgtacgcgcaggagcacagggacgtgccaggcccgcgcccgcccacccgtcgtcaaaggcacgaccgtcagcggggtctggtgtgggaggacgatgactcggcagacgacagcagcgtcctggatttgggagggagtggcaacccgtttgcgcaccttcgccccaggctggggagaatgttttaaaaaaaaaaaagcatgatgcaaaataaaaaactcaccaaggccatggcaccgagcgttggttttcttgtattccccttagtatgcggcgcgcggcgatgtatgaggaaggtcctcctccctcctacgagagtgtggtgagcgcggcgccagtggcggcggcgctgggttctcccttcgatgctcccctggacccgccgtttgtgcctccgcggtacctgcggcctaccggggggagaaacagcatccgttactctgagttggcacccctattcgacaccacccgtgtgtacctggtggacaacaagtcaacggatgtggcatccctgaactaccagaacgaccacagcaactttctgaccacggtcattcaaaacaatgactacagcccgggggaggcaagcacacagaccatcaatcttgacgaccggtcgcactggggcggcgacctgaaaaccatcctgcataccaacatgccaaatgtgaacgagttcatgtttaccaataagtttaaggcgcgggtgatggtgtcgcgcttgcctactaaggacaatcaggtggagctgaaatacgagtgggtggagttcacgctgcccgagggcaactactccgagaccatgaccatagaccttatgaacaacgcgatcgtggagcactacttgaaagtgggcagacagaacggggttctggaaagcgacatcggggtaaagtttgacacccgcaacttcagactggggtttgaccccgtcactggtcttgtcatgcctggggtatatacaaacgaagccttccatccagacatcattttgctgccaggatgcggggtggacttcacccacagccgcctgagcaacttgttgggcatccgcaagcggcaacccttccaggagggctttaggatcacctacgatgatctggagggtggtaacattcccgcactgttggatgtggacgcctaccaggcgagcttgaaagatgacaccgaacagggcgggggtggcgcaggcggcagcaacagcagtggcagcggcgcggaagagaactccaacgcggcagccgcggcaatgcagccggtggaggacatgaacgatcatgccattcgcggcgacacctttgccacacgggctgaggagaagcgcgctgaggccgaagcagcggccgaagctgccgcccccgctgcgcaacccgaggtcgagaagcctcagaagaaaccggtgatcaaacccctgacagaggacagcaagaaacgcagttacaacctaataagcaatgacagcaccttcacccagtaccgcagctggtaccttgcatacaactacggcgaccctcagaccggaatccgctcatggaccctgctttgcactcctgacgtaacctgcggctcggagcaggtctactggtcgttgccagacatgatgcaagaccccgtgaccttccgctccacgcgccagatcagcaactttccggtggtgggcgccgagctgttgcccgtgcactccaagagcttctacaacgaccaggccgtctactcccaactcatccgccagtttacctctctgacccacgtgttcaatcgctttcccgagaaccagattttggcgcgcccgccagcccccaccatcaccaccgtcagtgaaaacgttcctgctctcacagatcacgggacgctaccgctgcgcaacagcatcggaggagtccagcgagtgaccattactgacgccagacgccgcacctgcccctacgtttacaaggccctgggcatagtctcgccgcgcgtcctatcgagccgcactttttgagcaagcatgtccatccttatatcgcccagcaataacacaggctggggcctgcgcttcccaagcaagatgtttggcggggccaagaagcgctccgaccaacacccagtgcgcgtgcgcgggcactaccgcgcgccctggggcgcgcacaaacgcggccgcactgggcgcaccaccgtcgatgacgccatcgacgcggtggtggaggaggcgcgcaactacacgcccacgccgccaccagtgtccacagtggacgcggccattcagaccgtggtgcgcggagcccggcgctatgctaaaatgaagagacggcggaggcgcgtagcacgtcgccaccgccgccgacccggcactgccgcccaacgcgcggcggcggccctgcttaaccgcgcacgtcgcaccggccgacgggcggccatgcgggccgctcgaaggctggccgcgggtattgtcactgtgccccccaggtccaggcgacgagcggccgccgcagcagccgcggccattagtgctatgactcagggtcgcaggggcaacgtgtattgggtgcgcgactcggttagcggcctgcgcgtgcccgtgcgcacccgccccccgcgcaactagattgcaagaaaaaactacttagactcgtactgttgtatgtatccagcggcggcggcgcgcaacgaagctatgtccaagcgcaaaatcaaagaagagatgctccaggtcatcgcgccggagatctatggccccccgaagaaggaagagcaggattacaagccccgaaagctaaagcgggtcaaaaagaaaaagaaagatgatgatgatgaacttgacgacgaggtggaactgctgcacgctaccgcgcccaggcgacgggtacagtggaaaggtcgacgcgtaaaacgtgttttgcgacccggcaccaccgtagtctttacgcccggtgagcgctccacccgcacctacaagcgcgtgtatgatgaggtgtacggcgacgaggacctgcttgagcaggccaacgagcgcctcggggagtttgcctacggaaagcggcataaggacatgctggcgttgccgctggacgagggcaacccaacacctagcctaaagcccgtaacactgcagcaggtgctgcccgcgcttgcaccgtccgaagaaaagcgcggcctaaagcgcgagtctggtgacttggcacccaccgtgcagctgatggtacccaagcgccagcgactggaagatgtcttggaaaaaatgaccgtggaacctgggctggagcccgaggtccgcgtgcggccaatcaagcaggtggcgccgggactgggcgtgcagaccgtggacgttcagatacccactaccagtagcaccagtattgccaccgccacagagggcatggagacacaaacgtccccggttgcctcagcggtggcggatgccgcggtgcaggcggtcgctgcggccgcgtccaagacctctacggaggtgcaaacggacccgtggatgtttcgcgtttcagccccccggcgcccgcgccgttcgaggaagtacggcgccgccagcgcgctactgcccgaatatgccctacatccttccattgcgcctacccccggctatcgtggctacacctaccgccccagaagacgagcaactacccgacgccgaaccaccactggaacccgccgccgccgtcgccgtcgccagcccgtgctggccccgatttccgtgcgcagggtggctcgcgaaggaggcaggaccctggtgctgccaacagcgcgctaccaccccagcatcgtttaaaagccggtctttgtggttcttgcagatatggccctcacctgccgcctccgtttcccggtgccgggattccgaggaagaatgcaccgtaggaggggcatggccggccacggcctgacgggcggcatgcgtcgtgcgcaccaccggcggcggcgcgcgtcgcaccgtcgcatgcgcggcggtatcctgcccctccttattccactgatcgccgcggcgattggcgccgtgcccggaattgcatccgtggccttgcaggcgcagagacactgattaaaaacaagttgcatgtggaaaaatcaaaataaaaagtctggactctcacgctcgcttggtcctgtaactattttgtagaatggaagacatcaactttgcgtctctggccccgcgacacggctcgcgcccgttcatgggaaactggcaagatatcggcaccagcaatatgagcggtggcgccttcagctggggctcgctgtggagcggcattaaaaatttcggttccaccgttaagaactatggcagcaaggcctggaacagcagcacaggccagatgctgagggataagttgaaagagcaaaatttccaacaaaaggtggtagatggcctggcctctggcattagcggggtggtggacctggccaaccaggcagtgcaaaataagattaacagtaagcttgatccccgccctcccgtagaggagcctccaccggccgtggagacagtgtctccagaggggcgtggcgaaaagcgtccgcgccccgacagggaagaaactctggtgacgcaaatagacgagcctccctcgtacgaggaggcactaaagcaaggcctgcccaccacccgtcccatcgcgcccatggctaccggagtgctgggccagcacacacccgtaacgctggacctgcctccccccgccgacacccagcagaaacctgtgctgccaggcccgaccgccgttgttgtaacccgtcctagccgcgcgtccctgcgccgcgccgccagcggtccgcgatcgttgcggcccgtagccagtggcaactggcaaagcacactgaacagcatcgtgggtctgggggtgcaatccctgaagcgccgacgatgcttctgatagctaacgtgtcgtatgtgtgtcatgtatgcgtccatgtcgccgccagaggagctgctgagccgccgcgcgcccgctttccaagatggctaccccttcgatgatgccgcagtggtcttacatgcacatctcgggccaggacgcctcggagtacctgagccccgggctggtgcagtttgcccgcgccaccgagacgtacttcagcctgaataacaagtttagaaaccccacggtggcgcctacgcacgacgtgaccacagaccggtcccagcgtttgacgctgcggttcatccctgtggaccgtgaggatactgcgtactcgtacaaggcgcggttcaccctagctgtgggtgataaccgtgtgctggacatggcttccacgtactttgacatccgcggcgtgctggacaggggccctacttttaagccctactctggcactgcctacaacgccctggctcccaagggtgccccaaatccttgcgaatgggatgaagctgctactgctcttgaaataaacctagaagaagaggacgatgacaacgaagacgaagtagacgagcaagctgagcagcaaaaaactcacgtatttgggcaggcgccttattctggtataaatattacaaaggagggtattcaaataggtgtcgaaggtcaaacacctaaatatgccgataaaacatttcaacctgaacctcaaataggagaatctcagtggtacgaaacagaaattaatcatgcagctgggagagtcctaaaaaagactaccccaatgaaaccatgttacggttcatatgcaaaacccacaaatgaaaatggagggcaaggcattcttgtaaagcaacaaaatggaaagctagaaagtcaagtggaaatgcaatttttctcaactactgaggcagccgcaggcaatggtgataacttgactcctaaagtggtattgtacagtgaagatgtagatatagaaaccccagacactcatatttcttacatgcccactattaaggaaggtaactcacgagaactaatgggccaacaatctatgcccaacaggcctaattacattgcttttagggacaattttattggtctaatgtattacaacagcacgggtaatatgggtgttctggcgggccaagcatcgcagttgaatgctgttgtagatttgcaagacagaaacacagagctttcataccagcttttgcttgattccattggtgatagaaccaggtacttttctatgtggaatcaggctgttgacagctatgatccagatgttagaattattgaaaatcatggaactgaagatgaacttccaaattactgctttccactgggaggtgtgattaatacagagactcttaccaaggtaaaacctaaaacaggtcaggaaaatggatgggaaaaagatgctacagaattttcagataaaaatgaaataagagttggaaataattttgccatggaaatcaatctaaatgccaacctgtggagaaatttcctgtactccaacatagcgctgtatttgcccgacaagctaaagtacagtccttccaacgtaaaaatttctgataacccaaacacctacgactacatgaacaagcgagtggtggctcccgggctagtggactgctacattaaccttggagcacgctggtcccttgactatatggacaacgtcaacccatttaaccaccaccgcaatgctggcctgcgctaccgctcaatgttgctgggcaatggtcgctatgtgcccttccacatccaggtgcctcagaagttctttgccattaaaaacctccttctcctgccgggctcatacacctacgagtggaacttcaggaaggatgttaacatggttctgcagagctccctaggaaatgacctaagggttgacggagccagcattaagtttgatagcatttgcctttacgccaccttcttccccatggcccacaacaccgcctccacgcttgaggccatgcttagaaacgacaccaacgaccagtcctttaacgactatctctccgccgccaacatgctctaccctatacccgccaacgctaccaacgtgcccatatccatcccctcccgcaactgggcggctttccgcggctgggccttcacgcgccttaagactaaggaaaccccatcactgggctcgggctacgacccttattacacctactctggctctataccctacctagatggaaccttttacctcaaccacacctttaagaaggtggccattacctttgactcttctgtcagctggcctggcaatgaccgcctgcttacccccaacgagtttgaaattaagcgctcagttgacggggagggttacaacgttgcccagtgtaacatgaccaaagactggttcctggtacaaatgctagctaactataacattggctaccagggcttctatatcccagagagctacaaggaccgcatgtactccttctttagaaacttccagcccatgagccgtcaggtggtggatgatactaaatacaaggactaccaacaggtgggcatcctacaccaacacaacaactctggatttgttggctaccttgcccccaccatgcgcgaaggacaggcctaccctgctaacttcccctatccgcttataggcaagaccgcagttgacagcattacccagaaaaagtttctttgcgatcgcaccctttggcgcatcccattctccagtaactttatgtccatgggcgcactcacagacctgggccaaaaccttctctacgccaactccgcccacgcgctagacatgacttttgaggtggatcccatggacgagcccacccttctttatgttttgtttgaagtctttgacgtggtccgtgtgcaccagccgcaccgcggcgtcatcgaaaccgtgtacctgcgcacgcccttctcggccggcaacgccacaacataaagaagcaagcaacatcaacaacagctgccgccatgggctccagtgagcaggaactgaaagccattgtcaaagatcttggttgtgggccatattttttgggcacctatgacaagcgctttccaggctttgtttctccacacaagctcgcctgcgccatagtcaatacggccggtcgcgagactgggggcgtacactggatggcctttgcctggaacccgcactcaaaaacatgctacctctttgagccctttggcttttctgaccagcgactcaagcaggtttaccagtttgagtacgagtcactcctgcgccgtagcgccattgcttcttcccccgaccgctgtataacgctggaaaagtccacccaaagcgtacaggggcccaactcggccgcctgtggactattctgctgcatgtttctccacgcctttgccaactggccccaaactcccatggatcacaaccccaccatgaaccttattaccggggtacccaactccatgctcaacagtccccaggtacagcccaccctgcgtcgcaaccaggaacagctctacagcttcctggagcgccactcgccctacttccgcagccacagtgcgcagattaggagcgccacttctttttgtcacttgaaaaacatgtaaaaataatgtactagagacactttcaataaaggcaaatgcttttatttgtacactctcgggtgattatttacccccacccttgccgtctgcgccgtttaaaaatcaaaggggttctgccgcgcatcgctatgcgccactggcagggacacgttgcgatactggtgtttagtgctccacttaaactcaggcacaaccatccgcggcagctcggtgaagttttcactccacaggctgcgcaccatcaccaacgcgtttagcaggtcgggcgccgatatcttgaagtcgcagttggggcctccgccctgcgcgcgcgagttgcgatacacagggttgcagcactggaacactatcagcgccgggtggtgcacgctggccagcacgctcttgtcggagatcagatccgcgtccaggtcctccgcgttgctcagggcgaacggagtcaactttggtagctgccttcccaaaaagggcgcgtgcccaggctttgagttgcactcgcaccgtagtggcatcaaaaggtgaccgtgcccggtctgggcgttaggatacagcgcctgcataaaagccttgatctgcttaaaagccacctgagcctttgcgccttcagagaagaacatgccgcaagacttgccggaaaactgattggccggacaggccgcgtcgtgcacgcagcaccttgcgtcggtgttggagatctgcaccacatttcggccccaccggttcttcacgatcttggccttgctagactgctccttcagcgcgcgctgcccgttttcgctcgtcacatccatttcaatcacgtgctccttatttatcataatgcttccgtgtagacacttaagctcgccttcgatctcagcgcagcggtgcagccacaacgcgcagcccgtgggctcgtgatgcttgtaggtcacctctgcaaacgactgcaggtacgcctgcaggaatcgccccatcatcgtcacaaaggtcttgttgctggtgaaggtcagctgcaacccgcggtgctcctcgttcagccaggtcttgcatacggccgccagagcttccacttggtcaggcagtagtttgaagttcgcctttagatcgttatccacgtggtacttgtccatcagcgcgcgcgcagcctccatgcccttctcccacgcagacacgatcggcacactcagcgggttcatcaccgtaatttcactttccgcttcgctgggctcttcctcttcctcttgcgtccgcataccacgcgccactgggtcgtcttcattcagccgccgcactgtgcgcttacctcctttgccatgcttgattagcaccggtgggttgctgaaacccaccatttgtagcgccacatcttctctttcttcctcgctgtccacgattacctctggtgatggcgggcgctcgggcttgggagaagggcgcttctttttcttcttgggcgcaatggccaaatccgccgccgaggtcgatggccgcgggctgggtgtgcgcggcaccagcgcgtcttgtgatgagtcttcctcgtcctcggactcgatacgccgcctcatccgcttttttgggggcgcccggggaggcggcggcgacggggacggggacgacacgtcctccatggttgggggacgtcgcgccgcaccgcgtccgcgctcgggggtggtttcgcgctgctcctcttcccgactggccatttccttctcctataggcagaaaaagatcatggagtcagtcgagaagaaggacagcctaaccgccccctctgagttcgccaccaccgcctccaccgatgccgccaacgcgcctaccaccttccccgtcgaggcacccccgcttgaggaggaggaagtgattatcgagcaggacccaggttttgtaagcgaagacgacgaggaccgctcagtaccaacagaggataaaaagcaagaccaggacaacgcagaggcaaacgaggaacaagtcgggcggggggacgaaaggcatggcgactacctagatgtgggagacgacgtgctgttgaagcatctgcagcgccagtgcgccattatctgcgacgcgttgcaagagcgcagcgatgtgcccctcgccatagcggatgtcagccttgcctacgaacgccacctattctcaccgcgcgtaccccccaaacgccaagaaaacggcacatgcgagcccaacccgcgcctcaacttctaccccgtatttgccgtgccagaggtgcttgccacctatcacatctttttccaaaactgcaagatacccctatcctgccgtgccaaccgcagccgagcggacaagcagctggccttgcggcagggcgctgtcatacctgatatcgcctcgctcaacgaagtgccaaaaatctttgagggtcttggacgcgacgagaagcgcgcggcaaacgctctgcaacaggaaaacagcgaaaatgaaagtcactctggagtgttggtggaactcgagggtgacaacgcgcgcctagccgtactaaaacgcagcatcgaggtcacccactttgcctacccggcacttaacctaccccccaaggtcatgagcacagtcatgagtgagctgatcgtgcgccgtgcgcagcccctggagagggatgcaaatttgcaagaacaaacagaggagggcctacccgcagttggcgacgagcagctagcgcgctggcttcaaacgcgcgagcctgccgacttggaggagcgacgcaaactaatgatggccgcagtgctcgttaccgtggagcttgagtgcatgcagcggttctttgctgacccggagatgcagcgcaagctagaggaaacattgcactacacctttcgacagggctacgtacgccaggcctgcaagatctccaacgtggagctctgcaacctggtctcctaccttggaattttgcacgaaaaccgccttgggcaaaacgtgcttcattccacgctcaagggcgaggcgcgccgcgactacgtccgcgactgcgtttacttatttctatgctacacctggcagacggccatgggcgtttggcagcagtgcttggaggagtgcaacctcaaggagctgcagaaactgctaaagcaaaacttgaaggacctatggacggccttcaacgagcgctccgtggccgcgcacctggcggacatcattttccccgaacgcctgcttaaaaccctgcaacagggtctgccagacttcaccagtcaaagcatgttgcagaactttaggaactttatcctagagcgctcaggaatcttgcccgccacctgctgtgcacttcctagcgactttgtgcccattaagtaccgcgaatgccctccgccgctttggggccactgctaccttctgcagctagccaactaccttgcctaccactctgacataatggaagacgtgagcggtgacggtctactggagtgtcactgtcgctgcaacctatgcaccccgcaccgctccctggtttgcaattcgcagctgcttaacgaaagtcaaattatcggtacctttgagctgcagggtccctcgcctgacgaaaagtccgcggctccggggttgaaactcactccggggctgtggacgtcggcttaccttcgcaaatttgtacctgaggactaccacgcccacgagattaggttctacgaagaccaatcccgcccgcctaatgcggagcttaccgcctgcgtcattacccagggccacattcttggccaattgcaagccatcaacaaagcccgccaagagtttctgctacgaaagggacggggggtttacttggacccccagtccggcgaggagctcaacccaatccccccgccgccgcagccctatcagcagcagccgcgggcccttgcttcccaggatggcacccaaaaagaagctgcagctgccgccgccacccacggacgaggaggaatactgggacagtcaggcagaggaggttttggacgaggaggaggaggacatgatggaagactgggagagcctagacgaggaagcttccgaggtcgaagaggtgtcagacgaaacaccgtcaccctcggtcgcattcccctcgccggcgccccagaaatcggcaaccggttccagcatggctacaacctccgctcctcaggcgccgccggcactgcccgttcgccgacccaaccgtagatgggacaccactggaaccagggccggtaagtccaagcagccgccgccgttagcccaagagcaacaacagcgccaaggctaccgctcatggcgcgggcacaagaacgccatagttgcttgcttgcaagactgtgggggcaacatctccttcgcccgccgctttcttctctaccatcacggcgtggccttcccccgtaacatcctgcattactaccgtcatctctacagcccatactgcaccggcggcagcggcagcaacagcagcggccacacagaagcaaaggcgaccggatagcaagactctgacaaagcccaagaaatccacagcggcggcagcagcaggaggaggagcgctgcgtctggcgcccaacgaacccgtatcgacccgcgagcttagaaacaggatttttcccactctgtatgctatatttcaacagagcaggggccaagaacaagagctgaaaataaaaaacaggtctctgcgatccctcacccgcagctgcctgtatcacaaaagcgaagatcagcttcggcgcacgctggaagacgcggaggctctcttcagtaaatactgcgcgctgactcttaaggactagtttcgcgccctttctcaaatttaagcgcgaaaactacgtcatctccagcggccacacccggcgccagcacctgttgtcagcgccattatgagcaaggaaattcccacgccctacatgtggagttaccagccacaaatgggacttgcggctggagctgcccaagactactcaacccgaataaactacatgagcgcgggaccccacatgatatcccgggtcaacggaatacgcgcccaccgaaaccgaattctcctggaacaggcggctattaccaccacacctcgtaataaccttaatccccgtagttggcccgctgccctggtgtaccaggaaagtcccgctcccaccactgtggtacttcccagagacgcccaggccgaagttcagatgactaactcaggggcgcagcttgcgggcggctttcgtcacagggtgcggtcgcccgggcagggtataactcacctgacaatcagagggcgaggtattcagctcaacgacgagtcggtgagctcctcgcttggtctccgtccggacgggacatttcagatcggcggcgccggccgctcttcattcacgcctcgtcaggcaatcctaactctgcagacctcgtcctctgagccgcgctctggaggcattggaactctgcaatttattgaggagtttgtgccatcggtctactttaaccccttctcgggacctcccggccactatccggatcaatttattcctaactttgacgcggtaaaggactcggcggacggctacgactgaatgttaagtggagaggcagagcaactgcgcctgaaacacctggtccactgtcgccgccacaagtgctttgcccgcgactccggtgagttttgctactttgaattgcccgaggatcatatcgagggcccggcgcacggcgtccggcttaccgcccagggagagcttgcccgtagcctgattcgggagtttacccagcgccccctgctagttgagcgggacaggggaccctgtgttctcactgtgatttgcaactgtcctaaccctggattacatcaagatcctctagttaatgtcaggtcgcctaagtcgattaactagagtacccggggatcttattccctttaactaataaaaaaaaataataaagcatcacttacttaaaatcagttagcaaatttctgtccagtttattcagcagcacctccttgccctcctcccagctctggtattgcagcttcctcctggctgcaaactttctccacaatctaaatggaatgtcagtttcctcctgttcctgtccatccgcacccactatcttcatgttgttgcagatgaagcgcgcaagaccgtctgaagataccttcaaccccgtgtatccatatgacacggaaaccggtcctccaactgtgccttttcttactcctccctttgtatcccccaatgggtttcaagagagtccccctggggtactctctttgcgcctatccgaacctctagttacctccaatggcatgcttgcgctcaaaatgggcaacggcctctctctggacgaggccggcaaccttacctcccaaaatgtaaccactgtgagcccacctctcaaaaaaaccaagtcaaacataaacctggaaatatctgcacccctcacagttacctcagaagccctaactgtggctgccgccgcacctctaatggtcgcgggcaacacactcaccatgcaatcacaggccccgctaaccgtgcacgactccaaacttagcattgccacccaaggacccctcacagtgtcagaaggaaagctagccctgcaaacatcaggccccctcaccaccaccgatagcagtacccttactatcactgcctcaccccctctaactactgccactggtagcttgggcattgacttgaaagagcccatttatacacaaaatggaaaactaggactaaagtacggggctcctttgcatgtaacagacgacctaaacactttgaccgtagcaactggtccaggtgtgactattaataatacttccttgcaaactaaagttactggagccttgggttttgattcacaaggcaatatgcaacttaatgtagcaggaggactaaggattgattctcaaaacagacgccttatacttgatgttagttatccgtttgatgctcaaaaccaactaaatctaagactaggacagggccctctttttataaactcagcccacaacttggatattaactacaacaaaggcctttacttgtttacagcttcaaacaattccaaaaagcttgaggttaacctaagcactgccaaggggttgatgtttgacgctacagccatagccattaatgcaggagatgggcttgaatttggttcacctaatgcaccaaacacaaatcccctcaaaacaaaaattggccatggcctagaatttgattcaaacaaggctatggttcctaaactaggaactggccttagttttgacagcacaggtgccattacagtaggaaacaaaaataatgataagctaactttgtggaccggaataaaccctccacctaactgtcaaattgtggaaaacactaatacaaatgatggcaaacttactttagtattagtaaaaaatggagggcttgttaatggctacgtgtctctagttggtgtatcagacactgtgaaccaaatgttcacacaaaagacagcaaacatccaattaagattatattttgactcttctggaaatctattaactgaggaatcagacttaaaaattccacttaaaaataaatcttctacagcgaccagtgaaactgtagccagcagcaaagcctttatgccaagtactacagcttatcccttcaacaccactactagggatagtgaaaactacattcatggaatatgttactacatgactagttatgatagaagtctatttcccttgaacatttctataatgctaaacagccgtatgatttcttccaatgttgcctatgccatacaatttgaatggaatctaaatgcaagtgaatctccagaaagcaacatagctacgctgaccacatccccctttttcttttcttacattacagaagacgacaactaaagaatcgtttgtgttatgtttcaacgtgtttatttttcaattgcagaaaatttcaagtcatttttcattcagtagtatagccccaccaccacatagcttatacagatcaccgtaccttaatcaaactcacagaaccctagtattcaacctgccacctccctcccaacacacagagtacacagtcctttctccccggctggccttaaaaagcatcatatcatgggtaacagacatattcttaggtgttatattccacacggtttcctgtcgagccaaacgctcatcagtgatattaataaactccccgggcagctcacttaagttcatgtcgctgtccagctgctgagccacaggctgctgtccaacttgcggttgcttaacgggcggcgaaggagaagtccacgctcagcgaataaactgctgccgccgccgctccgtcctgcaggaatacaacatggcagtggtctcctcagcgatgattcgcaccgcccgcagcataaggcgccttgtcctccgggcacagcagcgcaccctgatctcacttaaatcagcacagtaactgcagcacagcaccacaatattgttcaaaatcccacagtgcaaggcgctgtatccaaagctcatggcggggaccacagaacccacgtggccatcataccacaagcgcaggtagattaagtggcgacccctcataaacacgctggacataaacattacctcttttggcatgttgtaattcaccacctcccggtaccatataaacctctgattaaacatggcgccatccaccaccatcctaaaccagctggccaaaacctgcccgccggctatacactgcagggaaccgggactggaacaatgacagtggagagcccaggactcgtaaccatggatcatcatgctcgtcatgatatcaatgttggcacaacacaggcacacgtgcatacacttcctcaggattacaagctcctcccgcgttagaaccatatcccagggaacaacccattcctgaatcagcgtaaatcccacactgcagggaagacctcgcacgtaactcacgttgtgcattgtcaaagtgttacattcgggcagcagcggatgatcctccagtatggtagcgcgggtttctgtctcaaaaggaggtagacgatccctactgtacggagtgcgccgagacaaccgagatcgtgttggtcgtagtgtcatgccaaatggaacgccggacgtagtcatatttcctgaagcaaaaccaggtgcgggcgtgacaaacagatctgcgtctccggtctcgccgcttagatcgctctgtgtagtagttgtagtatatccactctctcaaagcatccaggcgccccctggcttcgggttctatgtaaactccttcatgcgccgctgccctgataacatccaccaccgcagaataagccacacccagccaacctacacattcgttctgcgagtcacacacgggaggagcgggaagagctggaagaaccatgtttttttttttattccaaaagattatccaaaacctcaaaatgaagatctattaagtgaacgcgctcccctccggtggcgtggtcaaactctacagccaaagaacagataatggcatttgtaagatgttgcacaatggcttccaaaaggcaaacggccctcacgtccaagtggacgtaaaggctaaacccttcagggtgaatctcctctataaacattccagcaccttcaaccatgcccaaataattctcatctcgccaccttctcaatatatctctaagcaaatcccgaatattaagtccggccattgtaaaaatctgctccagagcgccctccaccttcagcctcaagcagcgaatcatgattgcaaaaattcaggttcctcacagacctgtataagattcaaaagcggaacattaacaaaaataccgcgatcccgtaggtcccttcgcagggccagctgaacataatcgtgcaggtctgcacggaccagcgcggccacttccccgccaggaaccatgacaaaagaacccacactgattatgacacgcatactcggagctatgctaaccagcgtagccccgatgtaagcttgttgcatgggcggcgatataaaatgcaaggtgctgctcaaaaaatcaggcaaagcctcgcgcaaaaaagaaagcacatcgtagtcatgctcatgcagataaaggcaggtaagctccggaaccaccacagaaaaagacaccatttttctctcaaacatgtctgcgggtttctgcataaacacaaaataaaataacaaaaaaacatttaaacattagaagcctgtcttacaacaggaaaaacaacccttataagcataagacggactacggccatgccggcgtgaccgtaaaaaaactggtcaccgtgattaaaaagcaccaccgacagctcctcggtcatgtccggagtcataatgtaagactcggtaaacacatcaggttgattcacatcggtcagtgctaaaaagcgaccgaaatagcccgggggaatacatacccgcaggcgtagagacaacattacagcccccataggaggtataacaaaattaataggagagaaaaacacataaacacctgaaaaaccctcctgcctaggcaaaatagcaccctcccgctccagaacaacatacagcgcttccacagcggcagccataacagtcagccttaccagtaaaaaagaaaacctattaaaaaaacaccactcgacacggcaccagctcaatcagtcacagtgtaaaaaagggccaagtgcagagcgagtatatataggactaaaaaatgacgtaacggttaaagtccacaaaaaacacccagaaaaccgcacgcgaacctacgcccagaaacgaaagccaaaaaacccacaacttcctcaaatcgtcacttccgttttcccacgttacgtcacttcccattttaagaaaactacaattcccaacacatacaagttactccgccctaaaacctacgtcacccgccccgttcccacgccccgcgccacgtcacaaactccaccccctcattatcatattggcttcaatccaaaataaggtatattattgatgatg

SEQ ID NO: 38 - DNA, 36119 bp, Artificial Sequence
  Adk35F2-Spike/E4orf6(mPGK)-E4dl-318(E4re#36)
ttaattaacatcatcaataatataccttattttggattgaagccaatatgataatgagggggtggagtttgtgacgtggcgcggggcgtgggaacggggcgggtgacgtagtagtgtggcggaagtgtgatgttgcaagtgtggcggaacacatgtaagcgacggatgtggcaaaagtgacgtttttggtgtgcgccggtgtacacaggaagtgacaattttcgcgcggttttaggcggatgttgtagtaaatttgggcgtaaccgagtaagatttggccattttcgcgggaaaactgaataagaggaagtgaaatctgaataattttgtgttactcatagcgcgtaataatttctgtaatagtaatcaattacggggtcattagttcatagcccatatatggagttccgcgttacataacttacggtaaatggcccgcctggctgaccgcccaacgacccccgcccattgacgtcaataatgacgtatgttcccatagtaacgccaatagggactttccattgacgtcaatgggtggagtatttacggtaaactgcccacttggcagtacatcaagtgtatcatatgccaagtacgccccctattgacgtcaatgacggtaaatggcccgcctggcattatgcccagtacatgaccttatgggactttcctacttggcagtacatctacgtattagtcatcgctattaccatggtgatgcggttttggcagtacatcaatgggcgtggatagcggtttgactcacggggatttccaagtctccaccccattgacgtcaatgggagtttgttttggcaccaaaatcaacgggactttccaaaatgtcgtaacaactccgccccattgacgcaaatgggcggtaggcgtgtacggtgggaggtctatataagcagagctctccctatcagtgatagagatctccctatcagtgatagagatcgtcgacgagctcgtttagtgaaccgtcagatcgcctggagacgccatccacgctgttttgacctccatagaagacaccgggaccgatccagcctccgatttgccaccatgtttgtgttcctggtgctgctgccactggtgtccagccagtgtgtgaacctgaccaccaggacccaacttcctcctgcctacaccaactccttcaccaggggagtctactaccctgacaaggtgttcaggtcctctgtgctgcacagcacccaggacctgttcctgccattcttcagcaatgtgacctggttccatgccatccatgtgtctggcaccaatggcaccaagaggtttgacaaccctgtgctgccattcaatgatggagtctactttgccagcacagagaagagcaacatcatcaggggctggatttttggcaccaccctggacagcaagacccagtccctgctgattgtgaacaatgccaccaatgtggtgattaaggtgtgtgagttccagttctgtaatgacccattcctgggagtctactaccacaagaacaacaagtcctggatggagtctgagttcagggtctactcctctgccaacaactgtacctttgaatatgtgagccaaccattcctgatggacttggagggcaagcagggcaacttcaagaacctgagggagtttgtgttcaagaacattgatggctacttcaagatttacagcaaacacacaccaatcaacctggtgagggacctgccacagggcttctctgccttggaaccactggtggacctgccaattggcatcaacatcaccaggttccagaccctgctggctctgcacaggtcctacctgacacctggagactcctcctctggctggacagcaggagcagcagcctactatgtgggctacctccaaccaaggaccttcctgctgaaatacaatgagaatggcaccatcacagatgctgtggactgtgccctggacccactgtctgagaccaagtgtaccctgaaatccttcacagtggagaagggcatctaccagaccagcaacttcagggtccaaccaacagagagcattgtgaggtttccaaacatcaccaacctgtgtccatttggagaggtgttcaatgccaccaggtttgcctctgtctatgcctggaacaggaagaggattagcaactgtgtggctgactactctgtgctctacaactctgcctccttcagcaccttcaagtgttatggagtgagcccaaccaaactgaatgacctgtgtttcaccaatgtctatgctgactcctttgtgattaggggagatgaggtgagacagattgcccctggacaaacaggcaagattgctgactacaactacaaactgcctgatgacttcacaggctgtgtgattgcctggaacagcaacaacctggacagcaaggtgggaggcaactacaactacctctacagactgttcaggaagagcaacctgaaaccatttgagagggacatcagcacagagatttaccaggctggcagcacaccatgtaatggagtggagggcttcaactgttactttccactccaatcctatggcttccaaccaaccaatggagtgggctaccaaccatacagggtggtggtgctgtcctttgaactgctccatgcccctgccacagtgtgtggaccaaagaagagcaccaacctggtgaagaacaagtgtgtgaacttcaacttcaatggactgacaggcacaggagtgctgacagagagcaacaagaagttcctgccattccaacagtttggcagggacattgctgacaccacagatgctgtgagggacccacagaccttggagattctggacatcacaccatgttcctttggaggagtgtctgtgattacacctggcaccaacaccagcaaccaggtggctgtgctctaccaggatgtgaactgtactgaggtgcctgtggctatccatgctgaccaacttacaccaacctggagggtctacagcacaggcagcaatgtgttccagaccagggctggctgtctgattggagcagagcatgtgaacaactcctatgagtgtgacatcccaattggagcaggcatctgtgcctcctaccagacccagaccggtggcggtgggtcgaggtctgtggcaagccagagcatcattgcctacacaatgagtctgggagcagagaactctgtggcttacagcaacaacagcattgccatcccaaccaacttcaccatctctgtgaccacagagattctgcctgtgagtatgaccaagacctctgtggactgtacaatgtatatctgtggagacagcacagagtgtagcaacctgctgctccaatatggctccttctgtacccaacttaacagggctctgacaggcattgctgtggaacaggacaagaacacccaggaggtgtttgcccaggtgaagcagatttacaagacacctccaatcaaggactttggaggcttcaacttcagccagattctgcctgacccaagcaagccaagcaagaggtccttcattgaggacctgctgttcaacaaggtgaccctggctgatgctggcttcatcaagcaatatggagactgtctgggagacattgctgccagggacctgatttgtgcccagaagttcaatggactgacagtgctgcctccactgctgacagatgagatgattgcccaatacacctctgccctgctggctggcaccatcacctctggctggacctttggagcaggagcagccctccaaatcccatttgctatgcagatggcttacaggttcaatggcattggagtgacccagaatgtgctctatgagaaccagaaactgattgccaaccagttcaactctgccattggcaagattcaggactccctgtccagcacagcctctgccctgggcaaactccaagatgtggtgaaccagaatgcccaggctctgaacaccctggtgaagcaactttccagcaactttggagccatctcctctgtgctgaatgacatcctgagcagactggacaaggtggaggctgaggtccagattgacagactgattacaggcagactccaatccctccaaacctatgtgacccaacaacttatcagggctgctgagattagggcatctgccaacctggctgccaccaagatgagtgagtgtgtgctgggacaaagcaagagggtggacttctgtggcaagggctaccacctgatgagttttccacagtctgcccctcatggagtggtgttcctgcatgtgacctatgtgcctgcccaggagaagaacttcaccacagcccctgccatctgccatgatggcaaggctcactttccaagggagggagtgtttgtgagcaatggcacccactggtttgtgacccagaggaacttctatgaaccacagattatcaccacagacaacacctttgtgtctggcaactgtgatgtggtgattggcattgtgaacaacacagtctatgacccactccaacctgaactggactccttcaaggaggaactggacaaatacttcaagaaccacaccagccctgatgtggacctgggagacatctctggcatcaatgcctctgtggtgaacatccagaaggagattgacagactgaatgaggtggctaagaacctgaatgagtccctgattgacctccaagaactgggcaaatatgaacaatacatcaagtggccatgaaaattgatcataatcagccataccacatttgtagaggttttacttgctttaaaaaacctcccacacctccccctgaacctgaaacataaaatgaatgcaattgttgttgttaacttgtttattgcagcttataatggttacaaataaagcaatagcatcacaaatttcacaaataaagcatttttttcactgcattctagttgtggtttgtccaaactcatcaatgtatcttaacgcggatcgggtaggggaggcgcttttcccaaggcagtctggagcatgcgctttagcagccccgctgggcacttggcgctacacaagtggcctctggcctcgcacacattccacatccaccggtaggcgccaaccggctccgttctttggtggccccttcgcgccaccttctactcctcccctagtcaggaagttcccccccgccccgcagctcgcgtcgtgcaggacgtgacaaatggaagtagcacgtctcactagtctcgtgcagatggacagcaccgctgagcaatggaagcgggtaggcctttggggcagcggccaatagcagctttgctccttcgctttctgggctcagaggctgggaaggggtgggtccgggggcgggctcaggggcgggctcaggggcggggcgggcgcccgaaggtcctccggaggcccggcattctgcacgcttcaaaagcgcacgtctgccgcgctgttctcctcttcctcatctccgggcctttcgaaactaccccaagctggccaccatgactacgtccggcgttccatttggcatgacactacgaccaacacgatctcggttgtctcggcgcactccgtacagtagggatcgtctacctccttttgagacagaaacccgcgctaccatactggaggatcatccgctgctgcccgaatgtaacactttgacaatgcacaacgtgagttacgtgcgaggtcttccctgcagtgtgggatttacgctgattcaggaatgggttgttccctgggatatggttctaacgcgggaggagcttgtaatcctgaggaagtgtatgcacgtgtgcctgtgttgtgccaacattgatatcatgacgagcatgatgatccatggttacgagtcctgggctctccactgtcattgttccagtcccggttccctgcagtgtatagccggcgggcaggttttggccagctggtttaggatggtggtggatggcgccatgtttaatcagaggtttatatggtaccgggaggtggtgaattacaacatgccaaaagaggtaatgtttatgtccagcgtgtttatgaggggtcgccacttaatctacctgcgcttgtggtatgatggccacgtgggttctgtggtccccgccatgagctttggatacagcgccttgcactgtgggattttgaacaatattgtggtgctgtgctgcagttactgtgctgatttaagtgagatcagggtgcgctgctgtgcccggaggacaaggcgccttatgctgcgggcggtgcgaatcatcgctgaggagaccactgccatgttgtattcctgcaggacggagcggcggcggcagcagtttattcgcgcgctgctgcagcaccaccgccctatcctgatgcacgattatgactctacccccatgtagaagcttggggatcaattctctagagctcgctgatcagcctcgactgtgccttctagttgccagccatctgttgtttgcccctcccccgtgccttccttgaccctggaaggtgccactcccactgtcctttcctaataaaatgaggaaattgcatcgcattgtctgagtaggtgtcattctattctggggggtggggtggggcaggacagcaagggggaggattgggaagacaatagcaggcatgctggggatgcggtgggctctatggcttctgaggaaattgggcgtggcttaagggtgggaaagaatatataaggtgggggtcttatgtagttttgtatctgttttgcagcagccgccgccgccatgagcaccaactcgtttgatggaagcattgtgagctcatatttgacaacgcgcatgcccccatgggccggggtgcgtcagaatgtgatgggctccagcattgatggtcgccccgtcctgcccgcaaactctactaccttgacctacgagaccgtgtctggaacgccgttggagactgcagcctccgccgccgcttcagccgctgcagccaccgcccgcgggattgtgactgactttgctttcctgagcccgcttgcaagcagtgcagcttcccgttcatccgcccgcgatgacaagttgacggctcttttggcacaattggattctttgacccgggaacttaatgtcgtttctcagcagctgttggatctgcgccagcaggtttctgccctgaaggcttcctcccctcccaatgcggtttaaaacataaataaaaaaccagactctgtttggatttggatcaagcaagtgtcttgctgtctttatttaggggttttgcgcgcgcggtaggcccgggaccagcggtctcggtcgttgagggtcctgtgtattttttccaggacgtggtaaaggtgactctggatgttcagatacatgggcataagcccgtctctggggtggaggtagcaccactgcagagcttcatgctgcggggtggtgttgtagatgatccagtcgtagcaggagcgctgggcgtggtgcctaaaaatgtctttcagtagcaagctgattgccaggggcaggcccttggtgtaagtgtttacaaagcggttaagctgggatgggtgcatacgtggggatatgagatgcatcttggactgtatttttaggttggctatgttcccagccatatccctccggggattcatgttgtgcagaaccaccagcacagtgtatccggtgcacttgggaaatttgtcatgtagcttagaaggaaatgcgtggaagaacttggagacgcccttgtgacctccaagattttccatgcattcgtccataatgatggcaatgggcccacgggcggcggcctgggcgaagatatttctgggatcactaacgtcatagttgtgttccaggatgagatcgtcataggccatttttacaaagcgcgggcggagggtgccagactgcggtataatggttccatccggcccaggggcgtagttaccctcacagatttgcatttcccacgctttgagttcagatggggggatcatgtctacctgcggggcgatgaagaaaacggtttccggggtaggggagatcagctgggaagaaagcaggttcctgagcagctgcgacttaccgcagccggtgggcccgtaaatcacacctattaccggctgcaactggtagttaagagagctgcagctgccgtcatccctgagcaggggggccacttcgttaagcatgtccctgactcgcatgttttccctgaccaaatccgccagaaggcgctcgccgcccagcgatagcagttcttgcaaggaagcaaagtttttcaacggtttgagaccgtccgccgtaggcatgcttttgagcgtttgaccaagcagttccaggcggtcccacagctcggtcacctgctctacggcatctcgatccagcatatctcctcgtttcgcgggttggggcggctttcgctgtacggcagtagtcggtgctcgtccagacgggccagggtcatgtctttccacgggcgcagggtcctcgtcagcgtagtctgggtcacggtgaaggggtgcgctccgggctgcgcgctggccagggtgcgcttgaggctggtcctgctggtgctgaagcgctgccggtcttcgccctgcgcgtcggccaggtagcatttgaccatggtgtcatagtccagcccctccgcggcgtggcccttggcgcgcagcttgcccttggaggaggcgccgcacgaggggcagtgcagacttttgagggcgtagagcttgggcgcgagaaataccgattccggggagtaggcatccgcgccgcaggccccgcagacggtctcgcattccacgagccaggtgagctctggccgttcggggtcaaaaaccaggtttcccccatgctttttgatgcgtttcttacctctggtttccatgagccggtgtccacgctcggtgacgaaaaggctgtccgtgtccccgtatacagacttgagaggcctgtcctcgagcggtgttccgcggtcctcctcgtatagaaactcggaccactctgagacaaaggctcgcgtccaggccagcacgaaggaggctaagtgggaggggtagcggtcgttgtccactagggggtccactcgctccagggtgtgaagacacatgtcgccctcttcggcatcaaggaaggtgattggtttgtaggtgtaggccacgtgaccgggtgttcctgaaggggggctataaaagggggtgggggcgcgttcgtcctcactctcttccgcatcgctgtctgcgagggccagctgttggggtgagtactccctctgaaaagcgggcatgacttctgcgctaagattgtcagtttccaaaaacgaggaggatttgatattcacctggcccgcggtgatgcctttgagggtggccgcatccatctggtcagaaaagacaatctttttgttgtcaagcttggtggcaaacgacccgtagagggcgttggacagcaacttggcgatggagcgcagggtttggtttttgtcgcgatcggcgcgctccttggccgcgatgtttagctgcacgtattcgcgcgcaacgcaccgccattcgggaaagacggtggtgcgctcgtcgggcaccaggtgcacgcgccaaccgcggttgtgcagggtgacaaggtcaacgctggtggctacctctccgcgtaggcgctcgttggtccagcagaggcggccgcccttgcgcgagcagaatggcggtagggggtctagctgcgtctcgtccggggggtctgcgtccacggtaaagaccccgggcagcaggcgcgcgtcgaagtagtctatcttgcatccttgcaagtctagcgcctgctgccatgcgcgggcggcaagcgcgcgctcgtatgggttgagtgggggaccccatggcatggggtgggtgagcgcggaggcgtacatgccgcaaatgtcgtaaacgtagaggggctctctgagtattccaagatatgtagggtagcatcttccaccgcggatgctggcgcgcacgtaatcgtatagttcgtgcgagggagcgaggaggtcgggaccgaggttgctacgggcgggctgctctgctcggaagactatctgcctgaagatggcatgtgagttggatgatatggttggacgctggaagacgttgaagctggcgtctgtgagacctaccgcgtcacgcacgaaggaggcgtaggagtcgcgcagcttgttgaccagctcggcggtgacctgcacgtctagggcgcagtagtccagggtttccttgatgatgtcatacttatcctgtcccttttttttccacagctcgcggttgaggacaaactcttcgcggtctttccagtactcttggatcggaaacccgtcggcctccgaacggtaagagcctagcatgtagaactggttgacggcctggtaggcgcagcatcccttttctacgggtagcgcgtatgcctgcgcggccttccggagcgaggtgtgggtgagcgcaaaggtgtccctgaccatgactttgaggtactggtatttgaagtcagtgtcgtcgcatccgccctgctcccagagcaaaaagtccgtgcgctttttggaacgcggatttggcagggcgaaggtgacatcgttgaagagtatctttcccgcgcgaggcataaagttgcgtgtgatgcggaagggtcccggcacctcggaacggttgttaattacctgggcggcgagcacgatctcgtcaaagccgttgatgttgtggcccacaatgtaaagttccaagaagcgcgggatgcccttgatggaaggcaattttttaagttcctcgtaggtgagctcttcaggggagctgagcccgtgctctgaaagggcccagtctgcaagatgagggttggaagcgacgaatgagctccacaggtcacgggccattagcatttgcaggtggtcgcgaaaggtcctaaactggcgacctatggccattttttctggggtgatgcagtagaaggtaagcgggtcttgttcccagcggtcccatccaaggttcgcggctaggtctcgcgcggcagtcactagaggctcatctccgccgaacttcatgaccagcatgaagggcacgagctgcttcccaaaggcccccatccaagtataggtctctacatcgtaggtgacaaagagacgctcggtgcgaggatgcgagccgatcgggaagaactggatctcccgccaccaattggaggagtggctattgatgtggtgaaagtagaagtccctgcgacgggccgaacactcgtgctggcttttgtaaaaacgtgcgcagtactggcagcggtgcacgggctgtacatcctgcacgaggttgacctgacgaccgcgcacaaggaagcagagtgggaatttgagcccctcgcctggcgggtttggctggtggtcttctacttcggctgcttgtccttgaccgtctggctgctcgaggggagttacggtggatcggaccaccacgccgcgcgagcccaaagtccagatgtccgcgcgcggcggtcggagcttgatgacaacatcgcgcagatgggagctgtccatggtctggagctcccgcggcgtcaggtcaggcgggagctcctgcaggtttacctcgcatagacgggtcagggcgcgggctagatccaggtgatacctaatttccaggggctggttggtggcggcgtcgatggcttgcaagaggccgcatccccgcggcgcgactacggtaccgcgcggcgggcggtgggccgcgggggtgtccttggatgatgcatctaaaagcggtgacgcgggcgagcccccggaggtagggggggctccggacccgccgggagagggggcaggggcacgtcggcgccgcgcgcgggcaggagctggtgctgcgcgcgtaggttgctggcgaacgcgacgacgcggcggttgatctcctgaatctggcgcctctgcgtgaagacgacgggcccggtgagcttgaacctgaaagagagttcgacagaatcaatttcggtgtcgttgacggcggcctggcgcaaaatctcctgcacgtctcctgagttgtcttgataggcgatctcggccatgaactgctcgatctcttcctcctggagatctccgcgtccggctcgctccacggtggcggcgaggtcgttggaaatgcgggccatgagctgcgagaaggcgttgaggcctccctcgttccagacgcggctgtagaccacgcccccttcggcatcgcgggcgcgcatgaccacctgcgcgagattgagctccacgtgccgggcgaagacggcgtagtttcgcaggcgctgaaagaggtagttgagggtggtggcggtgtgttctgccacgaagaagtacataacccagcgtcgcaacgtggattcgttgatatcccccaaggcctcaaggcgctccatggcctcgtagaagtccacggcgaagttgaaaaactgggagttgcgcgccgacacggttaactcctcctccagaagacggatgagctcggcgacagtgtcgcgcacctcgcgctcaaaggctacaggggcctcttcttcttcttcaatctcctcttccataagggcctccccttcttcttcttctggcggcggtgggggaggggggacacggcggcgacgacggcgcaccgggaggcggtcgacaaagcgctcgatcatctccccgcggcgacggcgcatggtctcggtgacggcgcggccgttctcgcgggggcgcagttggaagacgccgcccgtcatgtcccggttatgggttggcggggggctgccatgcggcagggatacggcgctaacgatgcatctcaacaattgttgtgtaggtactccgccgccgagggacctgagcgagtccgcatcgaccggatcggaaaacctctcgagaaaggcgtctaaccagtcacagtcgcaaggtaggctgagcaccgtggcgggcggcagcgggcggcggtcggggttgtttctggcggaggtgctgctgatgatgtaattaaagtaggcggtcttgagacggcggatggtcgacagaagcaccatgtccttgggtccggcctgctgaatgcgcaggcggtcggccatgccccaggcttcgttttgacatcggcgcaggtctttgtagtagtcttgcatgagcctttctaccggcacttcttcttctccttcctcttgtcctgcatctcttgcatctatcgctgcggcggcggcggagtttggccgtaggtggcgccctcttcctcccatgcgtgtgaccccgaagcccctcatcggctgaagcagggctaggtcggcgacaacgcgctcggctaatatggcctgctgcacctgcgtgagggtagactggaagtcatccatgtccacaaagcggtggtatgcgcccgtgttgatggtgtaagtgcagttggccataacggaccagttaacggtctggtgacccggctgcgagagctcggtgtacctgagacgcgagtaagccctcgagtcaaatacgtagtcgttgcaagtccgcaccaggtactggtatcccaccaaaaagtgcggcggcggctggcggtagaggggccagcgtagggtggccggggctccgggggcgagatcttccaacataaggcgatgatatccgtagatgtacctggacatccaggtgatgccggcggcggtggtggaggcgcgcggaaagtcgcggacgcggttccagatgttgcgcagcggcaaaaagtgctccatggtcgggacgctctggccggtcaggcgcgcgcaatcgttgacgctctagcgtgcaaaaggagagcctgtaagcgggcactcttccgtggtctggtggataaattcgcaagggtatcatggcggacgaccggggttcgagccccgtatccggccgtccgccgtgatccatgcggttaccgcccgcgtgtcgaacccaggtgtgcgacgtcagacaacgggggagtgctccttttggcttccttccaggcgcggcggctgctgcgctagcttttttggccactggccgcgcgcagcgtaagcggttaggctggaaagcgaaagcattaagtggctcgctccctgtagccggagggttattttccaagggttgagtcgcgggacccccggttcgagtctcggaccggccggactgcggcgaacgggggtttgcctccccgtcatgcaagaccccgcttgcaaattcctccggaaacagggacgagccccttttttgcttttcccagatgcatccggtgctgcggcagatgcgcccccctcctcagcagcggcaagagcaagagcagcggcagacatgcagggcaccctcccctcctcctaccgcgtcaggaggggcgacatccgcggttgacgcggcagcagatggtgattacgaacccccgcggcgccgggcccggcactacctggacttggaggagggcgagggcctggcgcggctaggagcgccctctcctgagcggcacccaagggtgcagctgaagcgtgatacgcgtgaggcgtacgtgccgcggcagaacctgtttcgcgaccgcgagggagaggagcccgaggagatgcgggatcgaaagttccacgcagggcgcgagctgcggcatggcctgaatcgcgagcggttgctgcgcgaggaggactttgagcccgacgcgcgaaccgggattagtcccgcgcgcgcacacgtggcggccgccgacctggtaaccgcatacgagcagacggtgaaccaggagattaactttcaaaaaagctttaacaaccacgtgcgtacgcttgtggcgcgcgaggaggtggctataggactgatgcatctgtgggactttgtaagcgcgctggagcaaaacccaaatagcaagccgctcatggcgcagctgttccttatagtgcagcacagcagggacaacgaggcattcagggatgcgctgctaaacatagtagagcccgagggccgctggctgctcgatttgataaacatcctgcagagcatagtggtgcaggagcgcagcttgagcctggctgacaaggtggccgccatcaactattccatgcttagcctgggcaagttttacgcccgcaagatataccataccccttacgttcccatagacaaggaggtaaagatcgaggggttctacatgcgcatggcgctgaaggtgcttaccttgagcgacgacctgggcgtttatcgcaacgagcgcatccacaaggccgtgagcgtgagccggcggcgcgagctcagcgaccgcgagctgatgcacagcctgcaaagggccctggctggcacgggcagcggcgatagagaggccgagtcctactttgacgcgggcgctgacctgcgctgggccccaagccgacgcgccctggaggcagctggggccggacctgggctggcggtggcacccgcgcgcgctggcaacgtcggcggcgtggaggaatatgacgaggacgatgagtacgagccagaggacggcgagtactaagcggtgatgtttctgatcagatgatgcaagacgcaacggacccggcggtgcgggcggcgctgcagagccagccgtccggccttaactccacggacgactggcgccaggtcatggaccgcatcatgtcgctgactgcgcgcaatcctgacgcgttccggcagcagccgcaggccaaccggctctccgcaattctggaagcggtggtcccggcgcgcgcaaaccccacgcacgagaaggtgctggcgatcgtaaacgcgctggccgaaaacagggccatccggcccgacgaggccggcctggtctacgacgcgctgcttcagcgcgtggctcgttacaacagcggcaacgtgcagaccaacctggaccggctggtgggggatgtgcgcgaggccgtggcgcagcgtgagcgcgcgcagcagcagggcaacctgggctccatggttgcactaaacgccttcctgagtacacagcccgccaacgtgccgcggggacaggaggactacaccaactttgtgagcgcactgcggctaatggtgactgagacaccgcaaagtgaggtgtaccagtctgggccagactattttttccagaccagtagacaaggcctgcagaccgtaaacctgagccaggctttcaaaaacttgcaggggctgtggggggtgcgggctcccacaggcgaccgcgcgaccgtgtctagcttgctgacgcccaactcgcgcctgttgctgctgctaatagcgcccttcacggacagtggcagcgtgtcccgggacacatacctaggtcacttgctgacactgtaccgcgaggccataggtcaggcgcatgtggacgagcatactttccaggagattacaagtgtcagccgcgcgctggggcaggaggacacgggcagcctggaggcaaccctaaactacctgctgaccaaccggcggcagaagatcccctcgttgcacagtttaaacagcgaggaggagcgcattttgcgctacgtgcagcagagcgtgagccttaacctgatgcgcgacggggtaacgcccagcgtggcgctggacatgaccgcgcgcaacatggaaccgggcatgtatgcctcaaaccggccgtttatcaaccgcctaatggactacttgcatcgcgcggccgccgtgaaccccgagtatttcaccaatgccatcttgaacccgcactggctaccgccccctggtttctacaccgggggattcgaggtgcccgagggtaacgatggattcctctgggacgacatagacgacagcgtgttttccccgcaaccgcagaccctgctagagttgcaacagcgcgagcaggcagaggcggcgctgcgaaaggaaagcttccgcaggccaagcagcttgtccgatctaggcgctgcggccccgcggtcagatgctagtagcccatttccaagcttgatagggtctcttaccagcactcgcaccacccgcccgcgcctgctgggcgaggaggagtacctaaacaactcgctgctgcagccgcagcgcgaaaaaaacctgcctccggcatttcccaacaacgggatagagagcctagtggacaagatgagtagatggaagacgtacgcgcaggagcacagggacgtgccaggcccgcgcccgcccacccgtcgtcaaaggcacgaccgtcagcggggtctggtgtgggaggacgatgactcggcagacgacagcagcgtcctggatttgggagggagtggcaacccgtttgcgcaccttcgccccaggctggggagaatgttttaaaaaaaaaaaagcatgatgcaaaataaaaaactcaccaaggccatggcaccgagcgttggttttcttgtattccccttagtatgcggcgcgcggcgatgtatgaggaaggtcctcctccctcctacgagagtgtggtgagcgcggcgccagtggcggcggcgctgggttctcccttcgatgctcccctggacccgccgtttgtgcctccgcggtacctgcggcctaccggggggagaaacagcatccgttactctgagttggcacccctattcgacaccacccgtgtgtacctggtggacaacaagtcaacggatgtggcatccctgaactaccagaacgaccacagcaactttctgaccacggtcattcaaaacaatgactacagcccgggggaggcaagcacacagaccatcaatcttgacgaccggtcgcactggggcggcgacctgaaaaccatcctgcataccaacatgccaaatgtgaacgagttcatgtttaccaataagtttaaggcgcgggtgatggtgtcgcgcttgcctactaaggacaatcaggtggagctgaaatacgagtgggtggagttcacgctgcccgagggcaactactccgagaccatgaccatagaccttatgaacaacgcgatcgtggagcactacttgaaagtgggcagacagaacggggttctggaaagcgacatcggggtaaagtttgacacccgcaacttcagactggggtttgaccccgtcactggtcttgtcatgcctggggtatatacaaacgaagccttccatccagacatcattttgctgccaggatgcggggtggacttcacccacagccgcctgagcaacttgttgggcatccgcaagcggcaacccttccaggagggctttaggatcacctacgatgatctggagggtggtaacattcccgcactgttggatgtggacgcctaccaggcgagcttgaaagatgacaccgaacagggcgggggtggcgcaggcggcagcaacagcagtggcagcggcgcggaagagaactccaacgcggcagccgcggcaatgcagccggtggaggacatgaacgatcatgccattcgcggcgacacctttgccacacgggctgaggagaagcgcgctgaggccgaagcagcggccgaagctgccgcccccgctgcgcaacccgaggtcgagaagcctcagaagaaaccggtgatcaaacccctgacagaggacagcaagaaacgcagttacaacctaataagcaatgacagcaccttcacccagtaccgcagctggtaccttgcatacaactacggcgaccctcagaccggaatccgctcatggaccctgctttgcactcctgacgtaacctgcggctcggagcaggtctactggtcgttgccagacatgatgcaagaccccgtgaccttccgctccacgcgccagatcagcaactttccggtggtgggcgccgagctgttgcccgtgcactccaagagcttctacaacgaccaggccgtctactcccaactcatccgccagtttacctctctgacccacgtgttcaatcgctttcccgagaaccagattttggcgcgcccgccagcccccaccatcaccaccgtcagtgaaaacgttcctgctctcacagatcacgggacgctaccgctgcgcaacagcatcggaggagtccagcgagtgaccattactgacgccagacgccgcacctgcccctacgtttacaaggccctgggcatagtctcgccgcgcgtcctatcgagccgcactttttgagcaagcatgtccatccttatatcgcccagcaataacacaggctggggcctgcgcttcccaagcaagatgtttggcggggccaagaagcgctccgaccaacacccagtgcgcgtgcgcgggcactaccgcgcgccctggggcgcgcacaaacgcggccgcactgggcgcaccaccgtcgatgacgccatcgacgcggtggtggaggaggcgcgcaactacacgcccacgccgccaccagtgtccacagtggacgcggccattcagaccgtggtgcgcggagcccggcgctatgctaaaatgaagagacggcggaggcgcgtagcacgtcgccaccgccgccgacccggcactgccgcccaacgcgcggcggcggccctgcttaaccgcgcacgtcgcaccggccgacgggcggccatgcgggccgctcgaaggctggccgcgggtattgtcactgtgccccccaggtccaggcgacgagcggccgccgcagcagccgcggccattagtgctatgactcagggtcgcaggggcaacgtgtattgggtgcgcgactcggttagcggcctgcgcgtgcccgtgcgcacccgccccccgcgcaactagattgcaagaaaaaactacttagactcgtactgttgtatgtatccagcggcggcggcgcgcaacgaagctatgtccaagcgcaaaatcaaagaagagatgctccaggtcatcgcgccggagatctatggccccccgaagaaggaagagcaggattacaagccccgaaagctaaagcgggtcaaaaagaaaaagaaagatgatgatgatgaacttgacgacgaggtggaactgctgcacgctaccgcgcccaggcgacgggtacagtggaaaggtcgacgcgtaaaacgtgttttgcgacccggcaccaccgtagtctttacgcccggtgagcgctccacccgcacctacaagcgcgtgtatgatgaggtgtacggcgacgaggacctgcttgagcaggccaacgagcgcctcggggagtttgcctacggaaagcggcataaggacatgctggcgttgccgctggacgagggcaacccaacacctagcctaaagcccgtaacactgcagcaggtgctgcccgcgcttgcaccgtccgaagaaaagcgcggcctaaagcgcgagtctggtgacttggcacccaccgtgcagctgatggtacccaagcgccagcgactggaagatgtcttggaaaaaatgaccgtggaacctgggctggagcccgaggtccgcgtgcggccaatcaagcaggtggcgccgggactgggcgtgcagaccgtggacgttcagatacccactaccagtagcaccagtattgccaccgccacagagggcatggagacacaaacgtccccggttgcctcagcggtggcggatgccgcggtgcaggcggtcgctgcggccgcgtccaagacctctacggaggtgcaaacggacccgtggatgtttcgcgtttcagccccccggcgcccgcgccgttcgaggaagtacggcgccgccagcgcgctactgcccgaatatgccctacatccttccattgcgcctacccccggctatcgtggctacacctaccgccccagaagacgagcaactacccgacgccgaaccaccactggaacccgccgccgccgtcgccgtcgccagcccgtgctggccccgatttccgtgcgcagggtggctcgcgaaggaggcaggaccctggtgctgccaacagcgcgctaccaccccagcatcgtttaaaagccggtctttgtggttcttgcagatatggccctcacctgccgcctccgtttcccggtgccgggattccgaggaagaatgcaccgtaggaggggcatggccggccacggcctgacgggcggcatgcgtcgtgcgcaccaccggcggcggcgcgcgtcgcaccgtcgcatgcgcggcggtatcctgcccctccttattccactgatcgccgcggcgattggcgccgtgcccggaattgcatccgtggccttgcaggcgcagagacactgattaaaaacaagttgcatgtggaaaaatcaaaataaaaagtctggactctcacgctcgcttggtcctgtaactattttgtagaatggaagacatcaactttgcgtctctggccccgcgacacggctcgcgcccgttcatgggaaactggcaagatatcggcaccagcaatatgagcggtggcgccttcagctggggctcgctgtggagcggcattaaaaatttcggttccaccgttaagaactatggcagcaaggcctggaacagcagcacaggccagatgctgagggataagttgaaagagcaaaatttccaacaaaaggtggtagatggcctggcctctggcattagcggggtggtggacctggccaaccaggcagtgcaaaataagattaacagtaagcttgatccccgccctcccgtagaggagcctccaccggccgtggagacagtgtctccagaggggcgtggcgaaaagcgtccgcgccccgacagggaagaaactctggtgacgcaaatagacgagcctccctcgtacgaggaggcactaaagcaaggcctgcccaccacccgtcccatcgcgcccatggctaccggagtgctgggccagcacacacccgtaacgctggacctgcctccccccgccgacacccagcagaaacctgtgctgccaggcccgaccgccgttgttgtaacccgtcctagccgcgcgtccctgcgccgcgccgccagcggtccgcgatcgttgcggcccgtagccagtggcaactggcaaagcacactgaacagcatcgtgggtctgggggtgcaatccctgaagcgccgacgatgcttctgatagctaacgtgtcgtatgtgtgtcatgtatgcgtccatgtcgccgccagaggagctgctgagccgccgcgcgcccgctttccaagatggctaccccttcgatgatgccgcagtggtcttacatgcacatctcgggccaggacgcctcggagtacctgagccccgggctggtgcagtttgcccgcgccaccgagacgtacttcagcctgaataacaagtttagaaaccccacggtggcgcctacgcacgacgtgaccacagaccggtcccagcgtttgacgctgcggttcatccctgtggaccgtgaggatactgcgtactcgtacaaggcgcggttcaccctagctgtgggtgataaccgtgtgctggacatggcttccacgtactttgacatccgcggcgtgctggacaggggccctacttttaagccctactctggcactgcctacaacgccctggctcccaagggtgccccaaatccttgcgaatgggatgaagctgctactgctcttgaaataaacctagaagaagaggacgatgacaacgaagacgaagtagacgagcaagctgagcagcaaaaaactcacgtatttgggcaggcgccttattctggtataaatattacaaaggagggtattcaaataggtgtcgaaggtcaaacacctaaatatgccgataaaacatttcaacctgaacctcaaataggagaatctcagtggtacgaaacagaaattaatcatgcagctgggagagtcctaaaaaagactaccccaatgaaaccatgttacggttcatatgcaaaacccacaaatgaaaatggagggcaaggcattcttgtaaagcaacaaaatggaaagctagaaagtcaagtggaaatgcaatttttctcaactactgaggcagccgcaggcaatggtgataacttgactcctaaagtggtattgtacagtgaagatgtagatatagaaaccccagacactcatatttcttacatgcccactattaaggaaggtaactcacgagaactaatgggccaacaatctatgcccaacaggcctaattacattgcttttagggacaattttattggtctaatgtattacaacagcacgggtaatatgggtgttctggcgggccaagcatcgcagttgaatgctgttgtagatttgcaagacagaaacacagagctttcataccagcttttgcttgattccattggtgatagaaccaggtacttttctatgtggaatcaggctgttgacagctatgatccagatgttagaattattgaaaatcatggaactgaagatgaacttccaaattactgctttccactgggaggtgtgattaatacagagactcttaccaaggtaaaacctaaaacaggtcaggaaaatggatgggaaaaagatgctacagaattttcagataaaaatgaaataagagttggaaataattttgccatggaaatcaatctaaatgccaacctgtggagaaatttcctgtactccaacatagcgctgtatttgcccgacaagctaaagtacagtccttccaacgtaaaaatttctgataacccaaacacctacgactacatgaacaagcgagtggtggctcccgggctagtggactgctacattaaccttggagcacgctggtcccttgactatatggacaacgtcaacccatttaaccaccaccgcaatgctggcctgcgctaccgctcaatgttgctgggcaatggtcgctatgtgcccttccacatccaggtgcctcagaagttctttgccattaaaaacctccttctcctgccgggctcatacacctacgagtggaacttcaggaaggatgttaacatggttctgcagagctccctaggaaatgacctaagggttgacggagccagcattaagtttgatagcatttgcctttacgccaccttcttccccatggcccacaacaccgcctccacgcttgaggccatgcttagaaacgacaccaacgaccagtcctttaacgactatctctccgccgccaacatgctctaccctatacccgccaacgctaccaacgtgcccatatccatcccctcccgcaactgggcggctttccgcggctgggccttcacgcgccttaagactaaggaaaccccatcactgggctcgggctacgacccttattacacctactctggctctataccctacctagatggaaccttttacctcaaccacacctttaagaaggtggccattacctttgactcttctgtcagctggcctggcaatgaccgcctgcttacccccaacgagtttgaaattaagcgctcagttgacggggagggttacaacgttgcccagtgtaacatgaccaaagactggttcctggtacaaatgctagctaactataacattggctaccagggcttctatatcccagagagctacaaggaccgcatgtactccttctttagaaacttccagcccatgagccgtcaggtggtggatgatactaaatacaaggactaccaacaggtgggcatcctacaccaacacaacaactctggatttgttggctaccttgcccccaccatgcgcgaaggacaggcctaccctgctaacttcccctatccgcttataggcaagaccgcagttgacagcattacccagaaaaagtttctttgcgatcgcaccctttggcgcatcccattctccagtaactttatgtccatgggcgcactcacagacctgggccaaaaccttctctacgccaactccgcccacgcgctagacatgacttttgaggtggatcccatggacgagcccacccttctttatgttttgtttgaagtctttgacgtggtccgtgtgcaccagccgcaccgcggcgtcatcgaaaccgtgtacctgcgcacgcccttctcggccggcaacgccacaacataaagaagcaagcaacatcaacaacagctgccgccatgggctccagtgagcaggaactgaaagccattgtcaaagatcttggttgtgggccatattttttgggcacctatgacaagcgctttccaggctttgtttctccacacaagctcgcctgcgccatagtcaatacggccggtcgcgagactgggggcgtacactggatggcctttgcctggaacccgcactcaaaaacatgctacctctttgagccctttggcttttctgaccagcgactcaagcaggtttaccagtttgagtacgagtcactcctgcgccgtagcgccattgcttcttcccccgaccgctgtataacgctggaaaagtccacccaaagcgtacaggggcccaactcggccgcctgtggactattctgctgcatgtttctccacgcctttgccaactggccccaaactcccatggatcacaaccccaccatgaaccttattaccggggtacccaactccatgctcaacagtccccaggtacagcccaccctgcgtcgcaaccaggaacagctctacagcttcctggagcgccactcgccctacttccgcagccacagtgcgcagattaggagcgccacttctttttgtcacttgaaaaacatgtaaaaataatgtactagagacactttcaataaaggcaaatgcttttatttgtacactctcgggtgattatttacccccacccttgccgtctgcgccgtttaaaaatcaaaggggttctgccgcgcatcgctatgcgccactggcagggacacgttgcgatactggtgtttagtgctccacttaaactcaggcacaaccatccgcggcagctcggtgaagttttcactccacaggctgcgcaccatcaccaacgcgtttagcaggtcgggcgccgatatcttgaagtcgcagttggggcctccgccctgcgcgcgcgagttgcgatacacagggttgcagcactggaacactatcagcgccgggtggtgcacgctggccagcacgctcttgtcggagatcagatccgcgtccaggtcctccgcgttgctcagggcgaacggagtcaactttggtagctgccttcccaaaaagggcgcgtgcccaggctttgagttgcactcgcaccgtagtggcatcaaaaggtgaccgtgcccggtctgggcgttaggatacagcgcctgcataaaagccttgatctgcttaaaagccacctgagcctttgcgccttcagagaagaacatgccgcaagacttgccggaaaactgattggccggacaggccgcgtcgtgcacgcagcaccttgcgtcggtgttggagatctgcaccacatttcggccccaccggttcttcacgatcttggccttgctagactgctccttcagcgcgcgctgcccgttttcgctcgtcacatccatttcaatcacgtgctccttatttatcataatgcttccgtgtagacacttaagctcgccttcgatctcagcgcagcggtgcagccacaacgcgcagcccgtgggctcgtgatgcttgtaggtcacctctgcaaacgactgcaggtacgcctgcaggaatcgccccatcatcgtcacaaaggtcttgttgctggtgaaggtcagctgcaacccgcggtgctcctcgttcagccaggtcttgcatacggccgccagagcttccacttggtcaggcagtagtttgaagttcgcctttagatcgttatccacgtggtacttgtccatcagcgcgcgcgcagcctccatgcccttctcccacgcagacacgatcggcacactcagcgggttcatcaccgtaatttcactttccgcttcgctgggctcttcctcttcctcttgcgtccgcataccacgcgccactgggtcgtcttcattcagccgccgcactgtgcgcttacctcctttgccatgcttgattagcaccggtgggttgctgaaacccaccatttgtagcgccacatcttctctttcttcctcgctgtccacgattacctctggtgatggcgggcgctcgggcttgggagaagggcgcttctttttcttcttgggcgcaatggccaaatccgccgccgaggtcgatggccgcgggctgggtgtgcgcggcaccagcgcgtcttgtgatgagtcttcctcgtcctcggactcgatacgccgcctcatccgcttttttgggggcgcccggggaggcggcggcgacggggacggggacgacacgtcctccatggttgggggacgtcgcgccgcaccgcgtccgcgctcgggggtggtttcgcgctgctcctcttcccgactggccatttccttctcctataggcagaaaaagatcatggagtcagtcgagaagaaggacagcctaaccgccccctctgagttcgccaccaccgcctccaccgatgccgccaacgcgcctaccaccttccccgtcgaggcacccccgcttgaggaggaggaagtgattatcgagcaggacccaggttttgtaagcgaagacgacgaggaccgctcagtaccaacagaggataaaaagcaagaccaggacaacgcagaggcaaacgaggaacaagtcgggcggggggacgaaaggcatggcgactacctagatgtgggagacgacgtgctgttgaagcatctgcagcgccagtgcgccattatctgcgacgcgttgcaagagcgcagcgatgtgcccctcgccatagcggatgtcagccttgcctacgaacgccacctattctcaccgcgcgtaccccccaaacgccaagaaaacggcacatgcgagcccaacccgcgcctcaacttctaccccgtatttgccgtgccagaggtgcttgccacctatcacatctttttccaaaactgcaagatacccctatcctgccgtgccaaccgcagccgagcggacaagcagctggccttgcggcagggcgctgtcatacctgatatcgcctcgctcaacgaagtgccaaaaatctttgagggtcttggacgcgacgagaagcgcgcggcaaacgctctgcaacaggaaaacagcgaaaatgaaagtcactctggagtgttggtggaactcgagggtgacaacgcgcgcctagccgtactaaaacgcagcatcgaggtcacccactttgcctacccggcacttaacctaccccccaaggtcatgagcacagtcatgagtgagctgatcgtgcgccgtgcgcagcccctggagagggatgcaaatttgcaagaacaaacagaggagggcctacccgcagttggcgacgagcagctagcgcgctggcttcaaacgcgcgagcctgccgacttggaggagcgacgcaaactaatgatggccgcagtgctcgttaccgtggagcttgagtgcatgcagcggttctttgctgacccggagatgcagcgcaagctagaggaaacattgcactacacctttcgacagggctacgtacgccaggcctgcaagatctccaacgtggagctctgcaacctggtctcctaccttggaattttgcacgaaaaccgccttgggcaaaacgtgcttcattccacgctcaagggcgaggcgcgccgcgactacgtccgcgactgcgtttacttatttctatgctacacctggcagacggccatgggcgtttggcagcagtgcttggaggagtgcaacctcaaggagctgcagaaactgctaaagcaaaacttgaaggacctatggacggccttcaacgagcgctccgtggccgcgcacctggcggacatcattttccccgaacgcctgcttaaaaccctgcaacagggtctgccagacttcaccagtcaaagcatgttgcagaactttaggaactttatcctagagcgctcaggaatcttgcccgccacctgctgtgcacttcctagcgactttgtgcccattaagtaccgcgaatgccctccgccgctttggggccactgctaccttctgcagctagccaactaccttgcctaccactctgacataatggaagacgtgagcggtgacggtctactggagtgtcactgtcgctgcaacctatgcaccccgcaccgctccctggtttgcaattcgcagctgcttaacgaaagtcaaattatcggtacctttgagctgcagggtccctcgcctgacgaaaagtccgcggctccggggttgaaactcactccggggctgtggacgtcggcttaccttcgcaaatttgtacctgaggactaccacgcccacgagattaggttctacgaagaccaatcccgcccgcctaatgcggagcttaccgcctgcgtcattacccagggccacattcttggccaattgcaagccatcaacaaagcccgccaagagtttctgctacgaaagggacggggggtttacttggacccccagtccggcgaggagctcaacccaatccccccgccgccgcagccctatcagcagcagccgcgggcccttgcttcccaggatggcacccaaaaagaagctgcagctgccgccgccacccacggacgaggaggaatactgggacagtcaggcagaggaggttttggacgaggaggaggaggacatgatggaagactgggagagcctagacgaggaagcttccgaggtcgaagaggtgtcagacgaaacaccgtcaccctcggtcgcattcccctcgccggcgccccagaaatcggcaaccggttccagcatggctacaacctccgctcctcaggcgccgccggcactgcccgttcgccgacccaaccgtagatgggacaccactggaaccagggccggtaagtccaagcagccgccgccgttagcccaagagcaacaacagcgccaaggctaccgctcatggcgcgggcacaagaacgccatagttgcttgcttgcaagactgtgggggcaacatctccttcgcccgccgctttcttctctaccatcacggcgtggccttcccccgtaacatcctgcattactaccgtcatctctacagcccatactgcaccggcggcagcggcagcaacagcagcggccacacagaagcaaaggcgaccggatagcaagactctgacaaagcccaagaaatccacagcggcggcagcagcaggaggaggagcgctgcgtctggcgcccaacgaacccgtatcgacccgcgagcttagaaacaggatttttcccactctgtatgctatatttcaacagagcaggggccaagaacaagagctgaaaataaaaaacaggtctctgcgatccctcacccgcagctgcctgtatcacaaaagcgaagatcagcttcggcgcacgctggaagacgcggaggctctcttcagtaaatactgcgcgctgactcttaaggactagtttcgcgccctttctcaaatttaagcgcgaaaactacgtcatctccagcggccacacccggcgccagcacctgttgtcagcgccattatgagcaaggaaattcccacgccctacatgtggagttaccagccacaaatgggacttgcggctggagctgcccaagactactcaacccgaataaactacatgagcgcgggaccccacatgatatcccgggtcaacggaatacgcgcccaccgaaaccgaattctcctggaacaggcggctattaccaccacacctcgtaataaccttaatccccgtagttggcccgctgccctggtgtaccaggaaagtcccgctcccaccactgtggtacttcccagagacgcccaggccgaagttcagatgactaactcaggggcgcagcttgcgggcggctttcgtcacagggtgcggtcgcccgggcagggtataactcacctgacaatcagagggcgaggtattcagctcaacgacgagtcggtgagctcctcgcttggtctccgtccggacgggacatttcagatcggcggcgccggccgctcttcattcacgcctcgtcaggcaatcctaactctgcagacctcgtcctctgagccgcgctctggaggcattggaactctgcaatttattgaggagtttgtgccatcggtctactttaaccccttctcgggacctcccggccactatccggatcaatttattcctaactttgacgcggtaaaggactcggcggacggctacgactgaatgttaagtggagaggcagagcaactgcgcctgaaacacctggtccactgtcgccgccacaagtgctttgcccgcgactccggtgagttttgctactttgaattgcccgaggatcatatcgagggcccggcgcacggcgtccggcttaccgcccagggagagcttgcccgtagcctgattcgggagtttacccagcgccccctgctagttgagcgggacaggggaccctgtgttctcactgtgatttgcaactgtcctaaccctggattacatcaagatcctctagttaatgtcaggtcgcctaagtcgattaactagagtacccggggatcttattccctttaactaataaaaaaaaataataaagcatcacttacttaaaatcagttagcaaatttctgtccagtttattcagcagcacctccttgccctcctcccagctctggtattgcagcttcctcctggctgcaaactttctccacaatctaaatggaatgtcagtttcctcctgttcctgtccatccgcacccactatcttcatgttgttgcagatgaagcgcgcaagaccgtctgaagataccttcaaccccgtgtatccatatgacacggaaaccggtcctccaactgtgccttttcttactcctccctttgtatcccccaatgggtttcaagagagtccccctggggtactctctttgcgcctatccgaacctctagttacctccaatggcatgcttgcgctcaaaatgggcaacggcctctctctggacgaggccggcaaccttacctcccaaaatgtaaccactgtgagcccacctctcaaaaaaaccaagtcaaacataaacctggaaatatctgcacccctcacagttacctcagaagccctaactgtggctgccgccgcacctctaatggtcgcgggcaacacactcaccatgcaatcacaggccccgctaaccgtgcacgactccaaacttagcattgccacccaaggacccctcacagtgtcagaaggaaagctagccctgcaaacatcaggccccctcaccaccaccgatagcagtacccttactatcactgcctcaccccctctaactactgccactggtagcttgggcattgacttgaaagagcccatttatacacaaaatggaaaactaggactaaagtacggggctcctttgcatgtaacagacgacctaaacactttgaccgtagcaactggtccaggtgtgactattaataatacttccttgcaaactaaagttactggagccttgggttttgattcacaaggcaatatgcaacttaatgtagcaggaggactaaggattgattctcaaaacagacgccttatacttgatgttagttatccgtttgatgctcaaaaccaactaaatctaagactaggacagggccctctttttataaactcagcccacaacttggatattaactacaacaaaggcctttacttgtttacagcttcaaacaattccaaaaagcttgaggttaacctaagcactgccaaggggttgatgtttgacgctacagccatagccattaatgcaggagatgggcttgaatttggttcacctaatgcaccaaacacaaatcccctcaaaacaaaaattggccatggcctagaatttgattcaaacaaggctatggttcctaaactaggaactggccttagttttgacagcacaggtgccattacagtaggaaacaaaaataatgataagctaactttgtggaccggaataaaccctccacctaactgtcaaattgtggaaaacactaatacaaatgatggcaaacttactttagtattagtaaaaaatggagggcttgttaatggctacgtgtctctagttggtgtatcagacactgtgaaccaaatgttcacacaaaagacagcaaacatccaattaagattatattttgactcttctggaaatctattaactgaggaatcagacttaaaaattccacttaaaaataaatcttctacagcgaccagtgaaactgtagccagcagcaaagcctttatgccaagtactacagcttatcccttcaacaccactactagggatagtgaaaactacattcatggaatatgttactacatgactagttatgatagaagtctatttcccttgaacatttctataatgctaaacagccgtatgatttcttccaatgttgcctatgccatacaatttgaatggaatctaaatgcaagtgaatctccagaaagcaacatagctacgctgaccacatccccctttttcttttcttacattacagaagacgacaactaaagaatcgtttgtgttatgtttcaacgtgtttatttttcaattgcagaaaatttcaagtcatttttcattcagtagtatagccccaccaccacatagcttatacagatcaccgtaccttaatcaaactcacagaaccctagtattcaacctgccacctccctcccaacacacagagtacacagtcctttctccccggctggccttaaaaagcatcatatcatgggtaacagacatattcttaggtgttatattccacacggtttcctgtcgagccaaacgctcatcagtgatattaataaactccccgggcagctcacttaagttcatgtcgctgtccagctgctgagccacaggctgctgtccaacttgcggttgcttaacgggcggcgaaggagaagtccacgctcagtagattaagtggcgacccctcataaacacgctggacataaacattacctcttttggcatgttgtaattcaccacctcccggtaccatataaacctctgattaaacatggcgccatccaccaccatcctaaaccagctggccaaaacctgcccgccggctatacactgcagggaaccgggactggaacaatgacagtggagagcccaggactcgtaaccatggatcatcatgctcgtcatgatatcaatgttggcacaacacaggcacacgtgcatacacttcctcaggattacaagctcctcccgcgttagaaccatatcccagggaacaacccattcctgaatcagcgtaaatcccacactgcagggaagacctcgcacgtaactcacgttgtgcattgtcaaagtgttacattcgggcagcagcggatgatcctccagtatggtagcgcgggtttctgtctcaaaaggaggtagacgatccctactgtacggagtgcgccgagacaaccgagatcgtgttggtcgtagtgtcatgccaaatggaacgccggacgtagtcatatttcctgaagcaaaaccaggtgcgggcgtgacaaacagatctgcgtctccggtctcgccgcttagatcgctctgtgtagtagttgtagtatatccactctctcaaagcatccaggcgccccctggcttcgggttctatgtaaactccttcatgcgccgctgccctgataacatccaccaccgcagaataagccacacccagccaacctacacattcgttctgcgagtcacacacgggaggagcgggaagagctggaagaaccatgtttttttttttattccaaaagattatccaaaacctcaaaatgaagatctattaagtgaacgcgctcccctccggtggcgtggtcaaactctacagccaaagaacagataatggcatttgtaagatgttgcacaatggcttccaaaaggcaaacggccctcacgtccaagtggacgtaaaggctaaacccttcagggtgaatctcctctataaacattccagcaccttcaaccatgcccaaataattctcatctcgccaccttctcaatatatctctaagcaaatcccgaatattaagtccggccattgtaaaaatctgctccagagcgccctccaccttcagcctcaagcagcgaatcatgattgcaaaaattcaggttcctcacagacctgtataagattcaaaagcggaacattaacaaaaataccgcgatcccgtaggtcccttcgcagggccagctgaacataatcgtgcaggtctgcacggaccagcgcggccacttccccgccaggaaccatgacaaaagaacccacactgattatgacacgcatactcggagctatgctaaccagcgtagccccgatgtaagcttgttgcatgggcggcgatataaaatgcaaggtgctgctcaaaaaatcaggcaaagcctcgcgcaaaaaagaaagcacatcgtagtcatgctcatgcagataaaggcaggtaagctccggaaccaccacagaaaaagacaccatttttctctcaaacatgtctgcgggtttctgcataaacacaaaataaaataacaaaaaaacatttaaacattagaagcctgtcttacaacaggaaaaacaacccttataagcataagacggactacggccatgccggcgtgaccgtaaaaaaactggtcaccgtgattaaaaagcaccaccgacagctcctcggtcatgtccggagtcataatgtaagactcggtaaacacatcaggttgattcacatcggtcagtgctaaaaagcgaccgaaatagcccgggggaatacatacccgcaggcgtagagacaacattacagcccccataggaggtataacaaaattaataggagagaaaaacacataaacacctgaaaaaccctcctgcctaggcaaaatagcaccctcccgctccagaacaacatacagcgcttccacagcggcagccataacagtcagccttaccagtaaaaaagaaaacctattaaaaaaacaccactcgacacggcaccagctcaatcagtcacagtgtaaaaaagggccaagtgcagagcgagtatatataggactaaaaaatgacgtaacggttaaagtccacaaaaaacacccagaaaaccgcacgcgaacctacgcccagaaacgaaagccaaaaaacccacaacttcctcaaatcgtcacttccgttttcccacgttacgtcacttcccattttaagaaaactacaattcccaacacatacaagttactccgccctaaaacctacgtcacccgccccgttcccacgccccgcgccacgtcacaaactccaccccctcattatcatattggcttcaatccaaaataaggtatattattgatgatg

SEQ ID NO: 39 - DNA, 36023 bp, Artificial Sequence
  Adk35F2-Spike/E4orf6(mPGK)-E4dl-421(E4re#37)
ttaattaacatcatcaataatataccttattttggattgaagccaatatgataatgagggggtggagtttgtgacgtggcgcggggcgtgggaacggggcgggtgacgtagtagtgtggcggaagtgtgatgttgcaagtgtggcggaacacatgtaagcgacggatgtggcaaaagtgacgtttttggtgtgcgccggtgtacacaggaagtgacaattttcgcgcggttttaggcggatgttgtagtaaatttgggcgtaaccgagtaagatttggccattttcgcgggaaaactgaataagaggaagtgaaatctgaataattttgtgttactcatagcgcgtaataatttctgtaatagtaatcaattacggggtcattagttcatagcccatatatggagttccgcgttacataacttacggtaaatggcccgcctggctgaccgcccaacgacccccgcccattgacgtcaataatgacgtatgttcccatagtaacgccaatagggactttccattgacgtcaatgggtggagtatttacggtaaactgcccacttggcagtacatcaagtgtatcatatgccaagtacgccccctattgacgtcaatgacggtaaatggcccgcctggcattatgcccagtacatgaccttatgggactttcctacttggcagtacatctacgtattagtcatcgctattaccatggtgatgcggttttggcagtacatcaatgggcgtggatagcggtttgactcacggggatttccaagtctccaccccattgacgtcaatgggagtttgttttggcaccaaaatcaacgggactttccaaaatgtcgtaacaactccgccccattgacgcaaatgggcggtaggcgtgtacggtgggaggtctatataagcagagctctccctatcagtgatagagatctccctatcagtgatagagatcgtcgacgagctcgtttagtgaaccgtcagatcgcctggagacgccatccacgctgttttgacctccatagaagacaccgggaccgatccagcctccgatttgccaccatgtttgtgttcctggtgctgctgccactggtgtccagccagtgtgtgaacctgaccaccaggacccaacttcctcctgcctacaccaactccttcaccaggggagtctactaccctgacaaggtgttcaggtcctctgtgctgcacagcacccaggacctgttcctgccattcttcagcaatgtgacctggttccatgccatccatgtgtctggcaccaatggcaccaagaggtttgacaaccctgtgctgccattcaatgatggagtctactttgccagcacagagaagagcaacatcatcaggggctggatttttggcaccaccctggacagcaagacccagtccctgctgattgtgaacaatgccaccaatgtggtgattaaggtgtgtgagttccagttctgtaatgacccattcctgggagtctactaccacaagaacaacaagtcctggatggagtctgagttcagggtctactcctctgccaacaactgtacctttgaatatgtgagccaaccattcctgatggacttggagggcaagcagggcaacttcaagaacctgagggagtttgtgttcaagaacattgatggctacttcaagatttacagcaaacacacaccaatcaacctggtgagggacctgccacagggcttctctgccttggaaccactggtggacctgccaattggcatcaacatcaccaggttccagaccctgctggctctgcacaggtcctacctgacacctggagactcctcctctggctggacagcaggagcagcagcctactatgtgggctacctccaaccaaggaccttcctgctgaaatacaatgagaatggcaccatcacagatgctgtggactgtgccctggacccactgtctgagaccaagtgtaccctgaaatccttcacagtggagaagggcatctaccagaccagcaacttcagggtccaaccaacagagagcattgtgaggtttccaaacatcaccaacctgtgtccatttggagaggtgttcaatgccaccaggtttgcctctgtctatgcctggaacaggaagaggattagcaactgtgtggctgactactctgtgctctacaactctgcctccttcagcaccttcaagtgttatggagtgagcccaaccaaactgaatgacctgtgtttcaccaatgtctatgctgactcctttgtgattaggggagatgaggtgagacagattgcccctggacaaacaggcaagattgctgactacaactacaaactgcctgatgacttcacaggctgtgtgattgcctggaacagcaacaacctggacagcaaggtgggaggcaactacaactacctctacagactgttcaggaagagcaacctgaaaccatttgagagggacatcagcacagagatttaccaggctggcagcacaccatgtaatggagtggagggcttcaactgttactttccactccaatcctatggcttccaaccaaccaatggagtgggctaccaaccatacagggtggtggtgctgtcctttgaactgctccatgcccctgccacagtgtgtggaccaaagaagagcaccaacctggtgaagaacaagtgtgtgaacttcaacttcaatggactgacaggcacaggagtgctgacagagagcaacaagaagttcctgccattccaacagtttggcagggacattgctgacaccacagatgctgtgagggacccacagaccttggagattctggacatcacaccatgttcctttggaggagtgtctgtgattacacctggcaccaacaccagcaaccaggtggctgtgctctaccaggatgtgaactgtactgaggtgcctgtggctatccatgctgaccaacttacaccaacctggagggtctacagcacaggcagcaatgtgttccagaccagggctggctgtctgattggagcagagcatgtgaacaactcctatgagtgtgacatcccaattggagcaggcatctgtgcctcctaccagacccagaccggtggcggtgggtcgaggtctgtggcaagccagagcatcattgcctacacaatgagtctgggagcagagaactctgtggcttacagcaacaacagcattgccatcccaaccaacttcaccatctctgtgaccacagagattctgcctgtgagtatgaccaagacctctgtggactgtacaatgtatatctgtggagacagcacagagtgtagcaacctgctgctccaatatggctccttctgtacccaacttaacagggctctgacaggcattgctgtggaacaggacaagaacacccaggaggtgtttgcccaggtgaagcagatttacaagacacctccaatcaaggactttggaggcttcaacttcagccagattctgcctgacccaagcaagccaagcaagaggtccttcattgaggacctgctgttcaacaaggtgaccctggctgatgctggcttcatcaagcaatatggagactgtctgggagacattgctgccagggacctgatttgtgcccagaagttcaatggactgacagtgctgcctccactgctgacagatgagatgattgcccaatacacctctgccctgctggctggcaccatcacctctggctggacctttggagcaggagcagccctccaaatcccatttgctatgcagatggcttacaggttcaatggcattggagtgacccagaatgtgctctatgagaaccagaaactgattgccaaccagttcaactctgccattggcaagattcaggactccctgtccagcacagcctctgccctgggcaaactccaagatgtggtgaaccagaatgcccaggctctgaacaccctggtgaagcaactttccagcaactttggagccatctcctctgtgctgaatgacatcctgagcagactggacaaggtggaggctgaggtccagattgacagactgattacaggcagactccaatccctccaaacctatgtgacccaacaacttatcagggctgctgagattagggcatctgccaacctggctgccaccaagatgagtgagtgtgtgctgggacaaagcaagagggtggacttctgtggcaagggctaccacctgatgagttttccacagtctgcccctcatggagtggtgttcctgcatgtgacctatgtgcctgcccaggagaagaacttcaccacagcccctgccatctgccatgatggcaaggctcactttccaagggagggagtgtttgtgagcaatggcacccactggtttgtgacccagaggaacttctatgaaccacagattatcaccacagacaacacctttgtgtctggcaactgtgatgtggtgattggcattgtgaacaacacagtctatgacccactccaacctgaactggactccttcaaggaggaactggacaaatacttcaagaaccacaccagccctgatgtggacctgggagacatctctggcatcaatgcctctgtggtgaacatccagaaggagattgacagactgaatgaggtggctaagaacctgaatgagtccctgattgacctccaagaactgggcaaatatgaacaatacatcaagtggccatgaaaattgatcataatcagccataccacatttgtagaggttttacttgctttaaaaaacctcccacacctccccctgaacctgaaacataaaatgaatgcaattgttgttgttaacttgtttattgcagcttataatggttacaaataaagcaatagcatcacaaatttcacaaataaagcatttttttcactgcattctagttgtggtttgtccaaactcatcaatgtatcttaacgcggatcgggtaggggaggcgcttttcccaaggcagtctggagcatgcgctttagcagccccgctgggcacttggcgctacacaagtggcctctggcctcgcacacattccacatccaccggtaggcgccaaccggctccgttctttggtggccccttcgcgccaccttctactcctcccctagtcaggaagttcccccccgccccgcagctcgcgtcgtgcaggacgtgacaaatggaagtagcacgtctcactagtctcgtgcagatggacagcaccgctgagcaatggaagcgggtaggcctttggggcagcggccaatagcagctttgctccttcgctttctgggctcagaggctgggaaggggtgggtccgggggcgggctcaggggcgggctcaggggcggggcgggcgcccgaaggtcctccggaggcccggcattctgcacgcttcaaaagcgcacgtctgccgcgctgttctcctcttcctcatctccgggcctttcgaaactaccccaagctggccaccatgactacgtccggcgttccatttggcatgacactacgaccaacacgatctcggttgtctcggcgcactccgtacagtagggatcgtctacctccttttgagacagaaacccgcgctaccatactggaggatcatccgctgctgcccgaatgtaacactttgacaatgcacaacgtgagttacgtgcgaggtcttccctgcagtgtgggatttacgctgattcaggaatgggttgttccctgggatatggttctaacgcgggaggagcttgtaatcctgaggaagtgtatgcacgtgtgcctgtgttgtgccaacattgatatcatgacgagcatgatgatccatggttacgagtcctgggctctccactgtcattgttccagtcccggttccctgcagtgtatagccggcgggcaggttttggccagctggtttaggatggtggtggatggcgccatgtttaatcagaggtttatatggtaccgggaggtggtgaattacaacatgccaaaagaggtaatgtttatgtccagcgtgtttatgaggggtcgccacttaatctacctgcgcttgtggtatgatggccacgtgggttctgtggtccccgccatgagctttggatacagcgccttgcactgtgggattttgaacaatattgtggtgctgtgctgcagttactgtgctgatttaagtgagatcagggtgcgctgctgtgcccggaggacaaggcgccttatgctgcgggcggtgcgaatcatcgctgaggagaccactgccatgttgtattcctgcaggacggagcggcggcggcagcagtttattcgcgcgctgctgcagcaccaccgccctatcctgatgcacgattatgactctacccccatgtagaagcttggggatcaattctctagagctcgctgatcagcctcgactgtgccttctagttgccagccatctgttgtttgcccctcccccgtgccttccttgaccctggaaggtgccactcccactgtcctttcctaataaaatgaggaaattgcatcgcattgtctgagtaggtgtcattctattctggggggtggggtggggcaggacagcaagggggaggattgggaagacaatagcaggcatgctggggatgcggtgggctctatggcttctgaggaaattgggcgtggcttaagggtgggaaagaatatataaggtgggggtcttatgtagttttgtatctgttttgcagcagccgccgccgccatgagcaccaactcgtttgatggaagcattgtgagctcatatttgacaacgcgcatgcccccatgggccggggtgcgtcagaatgtgatgggctccagcattgatggtcgccccgtcctgcccgcaaactctactaccttgacctacgagaccgtgtctggaacgccgttggagactgcagcctccgccgccgcttcagccgctgcagccaccgcccgcgggattgtgactgactttgctttcctgagcccgcttgcaagcagtgcagcttcccgttcatccgcccgcgatgacaagttgacggctcttttggcacaattggattctttgacccgggaacttaatgtcgtttctcagcagctgttggatctgcgccagcaggtttctgccctgaaggcttcctcccctcccaatgcggtttaaaacataaataaaaaaccagactctgtttggatttggatcaagcaagtgtcttgctgtctttatttaggggttttgcgcgcgcggtaggcccgggaccagcggtctcggtcgttgagggtcctgtgtattttttccaggacgtggtaaaggtgactctggatgttcagatacatgggcataagcccgtctctggggtggaggtagcaccactgcagagcttcatgctgcggggtggtgttgtagatgatccagtcgtagcaggagcgctgggcgtggtgcctaaaaatgtctttcagtagcaagctgattgccaggggcaggcccttggtgtaagtgtttacaaagcggttaagctgggatgggtgcatacgtggggatatgagatgcatcttggactgtatttttaggttggctatgttcccagccatatccctccggggattcatgttgtgcagaaccaccagcacagtgtatccggtgcacttgggaaatttgtcatgtagcttagaaggaaatgcgtggaagaacttggagacgcccttgtgacctccaagattttccatgcattcgtccataatgatggcaatgggcccacgggcggcggcctgggcgaagatatttctgggatcactaacgtcatagttgtgttccaggatgagatcgtcataggccatttttacaaagcgcgggcggagggtgccagactgcggtataatggttccatccggcccaggggcgtagttaccctcacagatttgcatttcccacgctttgagttcagatggggggatcatgtctacctgcggggcgatgaagaaaacggtttccggggtaggggagatcagctgggaagaaagcaggttcctgagcagctgcgacttaccgcagccggtgggcccgtaaatcacacctattaccggctgcaactggtagttaagagagctgcagctgccgtcatccctgagcaggggggccacttcgttaagcatgtccctgactcgcatgttttccctgaccaaatccgccagaaggcgctcgccgcccagcgatagcagttcttgcaaggaagcaaagtttttcaacggtttgagaccgtccgccgtaggcatgcttttgagcgtttgaccaagcagttccaggcggtcccacagctcggtcacctgctctacggcatctcgatccagcatatctcctcgtttcgcgggttggggcggctttcgctgtacggcagtagtcggtgctcgtccagacgggccagggtcatgtctttccacgggcgcagggtcctcgtcagcgtagtctgggtcacggtgaaggggtgcgctccgggctgcgcgctggccagggtgcgcttgaggctggtcctgctggtgctgaagcgctgccggtcttcgccctgcgcgtcggccaggtagcatttgaccatggtgtcatagtccagcccctccgcggcgtggcccttggcgcgcagcttgcccttggaggaggcgccgcacgaggggcagtgcagacttttgagggcgtagagcttgggcgcgagaaataccgattccggggagtaggcatccgcgccgcaggccccgcagacggtctcgcattccacgagccaggtgagctctggccgttcggggtcaaaaaccaggtttcccccatgctttttgatgcgtttcttacctctggtttccatgagccggtgtccacgctcggtgacgaaaaggctgtccgtgtccccgtatacagacttgagaggcctgtcctcgagcggtgttccgcggtcctcctcgtatagaaactcggaccactctgagacaaaggctcgcgtccaggccagcacgaaggaggctaagtgggaggggtagcggtcgttgtccactagggggtccactcgctccagggtgtgaagacacatgtcgccctcttcggcatcaaggaaggtgattggtttgtaggtgtaggccacgtgaccgggtgttcctgaaggggggctataaaagggggtgggggcgcgttcgtcctcactctcttccgcatcgctgtctgcgagggccagctgttggggtgagtactccctctgaaaagcgggcatgacttctgcgctaagattgtcagtttccaaaaacgaggaggatttgatattcacctggcccgcggtgatgcctttgagggtggccgcatccatctggtcagaaaagacaatctttttgttgtcaagcttggtggcaaacgacccgtagagggcgttggacagcaacttggcgatggagcgcagggtttggtttttgtcgcgatcggcgcgctccttggccgcgatgtttagctgcacgtattcgcgcgcaacgcaccgccattcgggaaagacggtggtgcgctcgtcgggcaccaggtgcacgcgccaaccgcggttgtgcagggtgacaaggtcaacgctggtggctacctctccgcgtaggcgctcgttggtccagcagaggcggccgcccttgcgcgagcagaatggcggtagggggtctagctgcgtctcgtccggggggtctgcgtccacggtaaagaccccgggcagcaggcgcgcgtcgaagtagtctatcttgcatccttgcaagtctagcgcctgctgccatgcgcgggcggcaagcgcgcgctcgtatgggttgagtgggggaccccatggcatggggtgggtgagcgcggaggcgtacatgccgcaaatgtcgtaaacgtagaggggctctctgagtattccaagatatgtagggtagcatcttccaccgcggatgctggcgcgcacgtaatcgtatagttcgtgcgagggagcgaggaggtcgggaccgaggttgctacgggcgggctgctctgctcggaagactatctgcctgaagatggcatgtgagttggatgatatggttggacgctggaagacgttgaagctggcgtctgtgagacctaccgcgtcacgcacgaaggaggcgtaggagtcgcgcagcttgttgaccagctcggcggtgacctgcacgtctagggcgcagtagtccagggtttccttgatgatgtcatacttatcctgtcccttttttttccacagctcgcggttgaggacaaactcttcgcggtctttccagtactcttggatcggaaacccgtcggcctccgaacggtaagagcctagcatgtagaactggttgacggcctggtaggcgcagcatcccttttctacgggtagcgcgtatgcctgcgcggccttccggagcgaggtgtgggtgagcgcaaaggtgtccctgaccatgactttgaggtactggtatttgaagtcagtgtcgtcgcatccgccctgctcccagagcaaaaagtccgtgcgctttttggaacgcggatttggcagggcgaaggtgacatcgttgaagagtatctttcccgcgcgaggcataaagttgcgtgtgatgcggaagggtcccggcacctcggaacggttgttaattacctgggcggcgagcacgatctcgtcaaagccgttgatgttgtggcccacaatgtaaagttccaagaagcgcgggatgcccttgatggaaggcaattttttaagttcctcgtaggtgagctcttcaggggagctgagcccgtgctctgaaagggcccagtctgcaagatgagggttggaagcgacgaatgagctccacaggtcacgggccattagcatttgcaggtggtcgcgaaaggtcctaaactggcgacctatggccattttttctggggtgatgcagtagaaggtaagcgggtcttgttcccagcggtcccatccaaggttcgcggctaggtctcgcgcggcagtcactagaggctcatctccgccgaacttcatgaccagcatgaagggcacgagctgcttcccaaaggcccccatccaagtataggtctctacatcgtaggtgacaaagagacgctcggtgcgaggatgcgagccgatcgggaagaactggatctcccgccaccaattggaggagtggctattgatgtggtgaaagtagaagtccctgcgacgggccgaacactcgtgctggcttttgtaaaaacgtgcgcagtactggcagcggtgcacgggctgtacatcctgcacgaggttgacctgacgaccgcgcacaaggaagcagagtgggaatttgagcccctcgcctggcgggtttggctggtggtcttctacttcggctgcttgtccttgaccgtctggctgctcgaggggagttacggtggatcggaccaccacgccgcgcgagcccaaagtccagatgtccgcgcgcggcggtcggagcttgatgacaacatcgcgcagatgggagctgtccatggtctggagctcccgcggcgtcaggtcaggcgggagctcctgcaggtttacctcgcatagacgggtcagggcgcgggctagatccaggtgatacctaatttccaggggctggttggtggcggcgtcgatggcttgcaagaggccgcatccccgcggcgcgactacggtaccgcgcggcgggcggtgggccgcgggggtgtccttggatgatgcatctaaaagcggtgacgcgggcgagcccccggaggtagggggggctccggacccgccgggagagggggcaggggcacgtcggcgccgcgcgcgggcaggagctggtgctgcgcgcgtaggttgctggcgaacgcgacgacgcggcggttgatctcctgaatctggcgcctctgcgtgaagacgacgggcccggtgagcttgaacctgaaagagagttcgacagaatcaatttcggtgtcgttgacggcggcctggcgcaaaatctcctgcacgtctcctgagttgtcttgataggcgatctcggccatgaactgctcgatctcttcctcctggagatctccgcgtccggctcgctccacggtggcggcgaggtcgttggaaatgcgggccatgagctgcgagaaggcgttgaggcctccctcgttccagacgcggctgtagaccacgcccccttcggcatcgcgggcgcgcatgaccacctgcgcgagattgagctccacgtgccgggcgaagacggcgtagtttcgcaggcgctgaaagaggtagttgagggtggtggcggtgtgttctgccacgaagaagtacataacccagcgtcgcaacgtggattcgttgatatcccccaaggcctcaaggcgctccatggcctcgtagaagtccacggcgaagttgaaaaactgggagttgcgcgccgacacggttaactcctcctccagaagacggatgagctcggcgacagtgtcgcgcacctcgcgctcaaaggctacaggggcctcttcttcttcttcaatctcctcttccataagggcctccccttcttcttcttctggcggcggtgggggaggggggacacggcggcgacgacggcgcaccgggaggcggtcgacaaagcgctcgatcatctccccgcggcgacggcgcatggtctcggtgacggcgcggccgttctcgcgggggcgcagttggaagacgccgcccgtcatgtcccggttatgggttggcggggggctgccatgcggcagggatacggcgctaacgatgcatctcaacaattgttgtgtaggtactccgccgccgagggacctgagcgagtccgcatcgaccggatcggaaaacctctcgagaaaggcgtctaaccagtcacagtcgcaaggtaggctgagcaccgtggcgggcggcagcgggcggcggtcggggttgtttctggcggaggtgctgctgatgatgtaattaaagtaggcggtcttgagacggcggatggtcgacagaagcaccatgtccttgggtccggcctgctgaatgcgcaggcggtcggccatgccccaggcttcgttttgacatcggcgcaggtctttgtagtagtcttgcatgagcctttctaccggcacttcttcttctccttcctcttgtcctgcatctcttgcatctatcgctgcggcggcggcggagtttggccgtaggtggcgccctcttcctcccatgcgtgtgaccccgaagcccctcatcggctgaagcagggctaggtcggcgacaacgcgctcggctaatatggcctgctgcacctgcgtgagggtagactggaagtcatccatgtccacaaagcggtggtatgcgcccgtgttgatggtgtaagtgcagttggccataacggaccagttaacggtctggtgacccggctgcgagagctcggtgtacctgagacgcgagtaagccctcgagtcaaatacgtagtcgttgcaagtccgcaccaggtactggtatcccaccaaaaagtgcggcggcggctggcggtagaggggccagcgtagggtggccggggctccgggggcgagatcttccaacataaggcgatgatatccgtagatgtacctggacatccaggtgatgccggcggcggtggtggaggcgcgcggaaagtcgcggacgcggttccagatgttgcgcagcggcaaaaagtgctccatggtcgggacgctctggccggtcaggcgcgcgcaatcgttgacgctctagcgtgcaaaaggagagcctgtaagcgggcactcttccgtggtctggtggataaattcgcaagggtatcatggcggacgaccggggttcgagccccgtatccggccgtccgccgtgatccatgcggttaccgcccgcgtgtcgaacccaggtgtgcgacgtcagacaacgggggagtgctccttttggcttccttccaggcgcggcggctgctgcgctagcttttttggccactggccgcgcgcagcgtaagcggttaggctggaaagcgaaagcattaagtggctcgctccctgtagccggagggttattttccaagggttgagtcgcgggacccccggttcgagtctcggaccggccggactgcggcgaacgggggtttgcctccccgtcatgcaagaccccgcttgcaaattcctccggaaacagggacgagccccttttttgcttttcccagatgcatccggtgctgcggcagatgcgcccccctcctcagcagcggcaagagcaagagcagcggcagacatgcagggcaccctcccctcctcctaccgcgtcaggaggggcgacatccgcggttgacgcggcagcagatggtgattacgaacccccgcggcgccgggcccggcactacctggacttggaggagggcgagggcctggcgcggctaggagcgccctctcctgagcggcacccaagggtgcagctgaagcgtgatacgcgtgaggcgtacgtgccgcggcagaacctgtttcgcgaccgcgagggagaggagcccgaggagatgcgggatcgaaagttccacgcagggcgcgagctgcggcatggcctgaatcgcgagcggttgctgcgcgaggaggactttgagcccgacgcgcgaaccgggattagtcccgcgcgcgcacacgtggcggccgccgacctggtaaccgcatacgagcagacggtgaaccaggagattaactttcaaaaaagctttaacaaccacgtgcgtacgcttgtggcgcgcgaggaggtggctataggactgatgcatctgtgggactttgtaagcgcgctggagcaaaacccaaatagcaagccgctcatggcgcagctgttccttatagtgcagcacagcagggacaacgaggcattcagggatgcgctgctaaacatagtagagcccgagggccgctggctgctcgatttgataaacatcctgcagagcatagtggtgcaggagcgcagcttgagcctggctgacaaggtggccgccatcaactattccatgcttagcctgggcaagttttacgcccgcaagatataccataccccttacgttcccatagacaaggaggtaaagatcgaggggttctacatgcgcatggcgctgaaggtgcttaccttgagcgacgacctgggcgtttatcgcaacgagcgcatccacaaggccgtgagcgtgagccggcggcgcgagctcagcgaccgcgagctgatgcacagcctgcaaagggccctggctggcacgggcagcggcgatagagaggccgagtcctactttgacgcgggcgctgacctgcgctgggccccaagccgacgcgccctggaggcagctggggccggacctgggctggcggtggcacccgcgcgcgctggcaacgtcggcggcgtggaggaatatgacgaggacgatgagtacgagccagaggacggcgagtactaagcggtgatgtttctgatcagatgatgcaagacgcaacggacccggcggtgcgggcggcgctgcagagccagccgtccggccttaactccacggacgactggcgccaggtcatggaccgcatcatgtcgctgactgcgcgcaatcctgacgcgttccggcagcagccgcaggccaaccggctctccgcaattctggaagcggtggtcccggcgcgcgcaaaccccacgcacgagaaggtgctggcgatcgtaaacgcgctggccgaaaacagggccatccggcccgacgaggccggcctggtctacgacgcgctgcttcagcgcgtggctcgttacaacagcggcaacgtgcagaccaacctggaccggctggtgggggatgtgcgcgaggccgtggcgcagcgtgagcgcgcgcagcagcagggcaacctgggctccatggttgcactaaacgccttcctgagtacacagcccgccaacgtgccgcggggacaggaggactacaccaactttgtgagcgcactgcggctaatggtgactgagacaccgcaaagtgaggtgtaccagtctgggccagactattttttccagaccagtagacaaggcctgcagaccgtaaacctgagccaggctttcaaaaacttgcaggggctgtggggggtgcgggctcccacaggcgaccgcgcgaccgtgtctagcttgctgacgcccaactcgcgcctgttgctgctgctaatagcgcccttcacggacagtggcagcgtgtcccgggacacatacctaggtcacttgctgacactgtaccgcgaggccataggtcaggcgcatgtggacgagcatactttccaggagattacaagtgtcagccgcgcgctggggcaggaggacacgggcagcctggaggcaaccctaaactacctgctgaccaaccggcggcagaagatcccctcgttgcacagtttaaacagcgaggaggagcgcattttgcgctacgtgcagcagagcgtgagccttaacctgatgcgcgacggggtaacgcccagcgtggcgctggacatgaccgcgcgcaacatggaaccgggcatgtatgcctcaaaccggccgtttatcaaccgcctaatggactacttgcatcgcgcggccgccgtgaaccccgagtatttcaccaatgccatcttgaacccgcactggctaccgccccctggtttctacaccgggggattcgaggtgcccgagggtaacgatggattcctctgggacgacatagacgacagcgtgttttccccgcaaccgcagaccctgctagagttgcaacagcgcgagcaggcagaggcggcgctgcgaaaggaaagcttccgcaggccaagcagcttgtccgatctaggcgctgcggccccgcggtcagatgctagtagcccatttccaagcttgatagggtctcttaccagcactcgcaccacccgcccgcgcctgctgggcgaggaggagtacctaaacaactcgctgctgcagccgcagcgcgaaaaaaacctgcctccggcatttcccaacaacgggatagagagcctagtggacaagatgagtagatggaagacgtacgcgcaggagcacagggacgtgccaggcccgcgcccgcccacccgtcgtcaaaggcacgaccgtcagcggggtctggtgtgggaggacgatgactcggcagacgacagcagcgtcctggatttgggagggagtggcaacccgtttgcgcaccttcgccccaggctggggagaatgttttaaaaaaaaaaaagcatgatgcaaaataaaaaactcaccaaggccatggcaccgagcgttggttttcttgtattccccttagtatgcggcgcgcggcgatgtatgaggaaggtcctcctccctcctacgagagtgtggtgagcgcggcgccagtggcggcggcgctgggttctcccttcgatgctcccctggacccgccgtttgtgcctccgcggtacctgcggcctaccggggggagaaacagcatccgttactctgagttggcacccctattcgacaccacccgtgtgtacctggtggacaacaagtcaacggatgtggcatccctgaactaccagaacgaccacagcaactttctgaccacggtcattcaaaacaatgactacagcccgggggaggcaagcacacagaccatcaatcttgacgaccggtcgcactggggcggcgacctgaaaaccatcctgcataccaacatgccaaatgtgaacgagttcatgtttaccaataagtttaaggcgcgggtgatggtgtcgcgcttgcctactaaggacaatcaggtggagctgaaatacgagtgggtggagttcacgctgcccgagggcaactactccgagaccatgaccatagaccttatgaacaacgcgatcgtggagcactacttgaaagtgggcagacagaacggggttctggaaagcgacatcggggtaaagtttgacacccgcaacttcagactggggtttgaccccgtcactggtcttgtcatgcctggggtatatacaaacgaagccttccatccagacatcattttgctgccaggatgcggggtggacttcacccacagccgcctgagcaacttgttgggcatccgcaagcggcaacccttccaggagggctttaggatcacctacgatgatctggagggtggtaacattcccgcactgttggatgtggacgcctaccaggcgagcttgaaagatgacaccgaacagggcgggggtggcgcaggcggcagcaacagcagtggcagcggcgcggaagagaactccaacgcggcagccgcggcaatgcagccggtggaggacatgaacgatcatgccattcgcggcgacacctttgccacacgggctgaggagaagcgcgctgaggccgaagcagcggccgaagctgccgcccccgctgcgcaacccgaggtcgagaagcctcagaagaaaccggtgatcaaacccctgacagaggacagcaagaaacgcagttacaacctaataagcaatgacagcaccttcacccagtaccgcagctggtaccttgcatacaactacggcgaccctcagaccggaatccgctcatggaccctgctttgcactcctgacgtaacctgcggctcggagcaggtctactggtcgttgccagacatgatgcaagaccccgtgaccttccgctccacgcgccagatcagcaactttccggtggtgggcgccgagctgttgcccgtgcactccaagagcttctacaacgaccaggccgtctactcccaactcatccgccagtttacctctctgacccacgtgttcaatcgctttcccgagaaccagattttggcgcgcccgccagcccccaccatcaccaccgtcagtgaaaacgttcctgctctcacagatcacgggacgctaccgctgcgcaacagcatcggaggagtccagcgagtgaccattactgacgccagacgccgcacctgcccctacgtttacaaggccctgggcatagtctcgccgcgcgtcctatcgagccgcactttttgagcaagcatgtccatccttatatcgcccagcaataacacaggctggggcctgcgcttcccaagcaagatgtttggcggggccaagaagcgctccgaccaacacccagtgcgcgtgcgcgggcactaccgcgcgccctggggcgcgcacaaacgcggccgcactgggcgcaccaccgtcgatgacgccatcgacgcggtggtggaggaggcgcgcaactacacgcccacgccgccaccagtgtccacagtggacgcggccattcagaccgtggtgcgcggagcccggcgctatgctaaaatgaagagacggcggaggcgcgtagcacgtcgccaccgccgccgacccggcactgccgcccaacgcgcggcggcggccctgcttaaccgcgcacgtcgcaccggccgacgggcggccatgcgggccgctcgaaggctggccgcgggtattgtcactgtgccccccaggtccaggcgacgagcggccgccgcagcagccgcggccattagtgctatgactcagggtcgcaggggcaacgtgtattgggtgcgcgactcggttagcggcctgcgcgtgcccgtgcgcacccgccccccgcgcaactagattgcaagaaaaaactacttagactcgtactgttgtatgtatccagcggcggcggcgcgcaacgaagctatgtccaagcgcaaaatcaaagaagagatgctccaggtcatcgcgccggagatctatggccccccgaagaaggaagagcaggattacaagccccgaaagctaaagcgggtcaaaaagaaaaagaaagatgatgatgatgaacttgacgacgaggtggaactgctgcacgctaccgcgcccaggcgacgggtacagtggaaaggtcgacgcgtaaaacgtgttttgcgacccggcaccaccgtagtctttacgcccggtgagcgctccacccgcacctacaagcgcgtgtatgatgaggtgtacggcgacgaggacctgcttgagcaggccaacgagcgcctcggggagtttgcctacggaaagcggcataaggacatgctggcgttgccgctggacgagggcaacccaacacctagcctaaagcccgtaacactgcagcaggtgctgcccgcgcttgcaccgtccgaagaaaagcgcggcctaaagcgcgagtctggtgacttggcacccaccgtgcagctgatggtacccaagcgccagcgactggaagatgtcttggaaaaaatgaccgtggaacctgggctggagcccgaggtccgcgtgcggccaatcaagcaggtggcgccgggactgggcgtgcagaccgtggacgttcagatacccactaccagtagcaccagtattgccaccgccacagagggcatggagacacaaacgtccccggttgcctcagcggtggcggatgccgcggtgcaggcggtcgctgcggccgcgtccaagacctctacggaggtgcaaacggacccgtggatgtttcgcgtttcagccccccggcgcccgcgccgttcgaggaagtacggcgccgccagcgcgctactgcccgaatatgccctacatccttccattgcgcctacccccggctatcgtggctacacctaccgccccagaagacgagcaactacccgacgccgaaccaccactggaacccgccgccgccgtcgccgtcgccagcccgtgctggccccgatttccgtgcgcagggtggctcgcgaaggaggcaggaccctggtgctgccaacagcgcgctaccaccccagcatcgtttaaaagccggtctttgtggttcttgcagatatggccctcacctgccgcctccgtttcccggtgccgggattccgaggaagaatgcaccgtaggaggggcatggccggccacggcctgacgggcggcatgcgtcgtgcgcaccaccggcggcggcgcgcgtcgcaccgtcgcatgcgcggcggtatcctgcccctccttattccactgatcgccgcggcgattggcgccgtgcccggaattgcatccgtggccttgcaggcgcagagacactgattaaaaacaagttgcatgtggaaaaatcaaaataaaaagtctggactctcacgctcgcttggtcctgtaactattttgtagaatggaagacatcaactttgcgtctctggccccgcgacacggctcgcgcccgttcatgggaaactggcaagatatcggcaccagcaatatgagcggtggcgccttcagctggggctcgctgtggagcggcattaaaaatttcggttccaccgttaagaactatggcagcaaggcctggaacagcagcacaggccagatgctgagggataagttgaaagagcaaaatttccaacaaaaggtggtagatggcctggcctctggcattagcggggtggtggacctggccaaccaggcagtgcaaaataagattaacagtaagcttgatccccgccctcccgtagaggagcctccaccggccgtggagacagtgtctccagaggggcgtggcgaaaagcgtccgcgccccgacagggaagaaactctggtgacgcaaatagacgagcctccctcgtacgaggaggcactaaagcaaggcctgcccaccacccgtcccatcgcgcccatggctaccggagtgctgggccagcacacacccgtaacgctggacctgcctccccccgccgacacccagcagaaacctgtgctgccaggcccgaccgccgttgttgtaacccgtcctagccgcgcgtccctgcgccgcgccgccagcggtccgcgatcgttgcggcccgtagccagtggcaactggcaaagcacactgaacagcatcgtgggtctgggggtgcaatccctgaagcgccgacgatgcttctgatagctaacgtgtcgtatgtgtgtcatgtatgcgtccatgtcgccgccagaggagctgctgagccgccgcgcgcccgctttccaagatggctaccccttcgatgatgccgcagtggtcttacatgcacatctcgggccaggacgcctcggagtacctgagccccgggctggtgcagtttgcccgcgccaccgagacgtacttcagcctgaataacaagtttagaaaccccacggtggcgcctacgcacgacgtgaccacagaccggtcccagcgtttgacgctgcggttcatccctgtggaccgtgaggatactgcgtactcgtacaaggcgcggttcaccctagctgtgggtgataaccgtgtgctggacatggcttccacgtactttgacatccgcggcgtgctggacaggggccctacttttaagccctactctggcactgcctacaacgccctggctcccaagggtgccccaaatccttgcgaatgggatgaagctgctactgctcttgaaataaacctagaagaagaggacgatgacaacgaagacgaagtagacgagcaagctgagcagcaaaaaactcacgtatttgggcaggcgccttattctggtataaatattacaaaggagggtattcaaataggtgtcgaaggtcaaacacctaaatatgccgataaaacatttcaacctgaacctcaaataggagaatctcagtggtacgaaacagaaattaatcatgcagctgggagagtcctaaaaaagactaccccaatgaaaccatgttacggttcatatgcaaaacccacaaatgaaaatggagggcaaggcattcttgtaaagcaacaaaatggaaagctagaaagtcaagtggaaatgcaatttttctcaactactgaggcagccgcaggcaatggtgataacttgactcctaaagtggtattgtacagtgaagatgtagatatagaaaccccagacactcatatttcttacatgcccactattaaggaaggtaactcacgagaactaatgggccaacaatctatgcccaacaggcctaattacattgcttttagggacaattttattggtctaatgtattacaacagcacgggtaatatgggtgttctggcgggccaagcatcgcagttgaatgctgttgtagatttgcaagacagaaacacagagctttcataccagcttttgcttgattccattggtgatagaaccaggtacttttctatgtggaatcaggctgttgacagctatgatccagatgttagaattattgaaaatcatggaactgaagatgaacttccaaattactgctttccactgggaggtgtgattaatacagagactcttaccaaggtaaaacctaaaacaggtcaggaaaatggatgggaaaaagatgctacagaattttcagataaaaatgaaataagagttggaaataattttgccatggaaatcaatctaaatgccaacctgtggagaaatttcctgtactccaacatagcgctgtatttgcccgacaagctaaagtacagtccttccaacgtaaaaatttctgataacccaaacacctacgactacatgaacaagcgagtggtggctcccgggctagtggactgctacattaaccttggagcacgctggtcccttgactatatggacaacgtcaacccatttaaccaccaccgcaatgctggcctgcgctaccgctcaatgttgctgggcaatggtcgctatgtgcccttccacatccaggtgcctcagaagttctttgccattaaaaacctccttctcctgccgggctcatacacctacgagtggaacttcaggaaggatgttaacatggttctgcagagctccctaggaaatgacctaagggttgacggagccagcattaagtttgatagcatttgcctttacgccaccttcttccccatggcccacaacaccgcctccacgcttgaggccatgcttagaaacgacaccaacgaccagtcctttaacgactatctctccgccgccaacatgctctaccctatacccgccaacgctaccaacgtgcccatatccatcccctcccgcaactgggcggctttccgcggctgggccttcacgcgccttaagactaaggaaaccccatcactgggctcgggctacgacccttattacacctactctggctctataccctacctagatggaaccttttacctcaaccacacctttaagaaggtggccattacctttgactcttctgtcagctggcctggcaatgaccgcctgcttacccccaacgagtttgaaattaagcgctcagttgacggggagggttacaacgttgcccagtgtaacatgaccaaagactggttcctggtacaaatgctagctaactataacattggctaccagggcttctatatcccagagagctacaaggaccgcatgtactccttctttagaaacttccagcccatgagccgtcaggtggtggatgatactaaatacaaggactaccaacaggtgggcatcctacaccaacacaacaactctggatttgttggctaccttgcccccaccatgcgcgaaggacaggcctaccctgctaacttcccctatccgcttataggcaagaccgcagttgacagcattacccagaaaaagtttctttgcgatcgcaccctttggcgcatcccattctccagtaactttatgtccatgggcgcactcacagacctgggccaaaaccttctctacgccaactccgcccacgcgctagacatgacttttgaggtggatcccatggacgagcccacccttctttatgttttgtttgaagtctttgacgtggtccgtgtgcaccagccgcaccgcggcgtcatcgaaaccgtgtacctgcgcacgcccttctcggccggcaacgccacaacataaagaagcaagcaacatcaacaacagctgccgccatgggctccagtgagcaggaactgaaagccattgtcaaagatcttggttgtgggccatattttttgggcacctatgacaagcgctttccaggctttgtttctccacacaagctcgcctgcgccatagtcaatacggccggtcgcgagactgggggcgtacactggatggcctttgcctggaacccgcactcaaaaacatgctacctctttgagccctttggcttttctgaccagcgactcaagcaggtttaccagtttgagtacgagtcactcctgcgccgtagcgccattgcttcttcccccgaccgctgtataacgctggaaaagtccacccaaagcgtacaggggcccaactcggccgcctgtggactattctgctgcatgtttctccacgcctttgccaactggccccaaactcccatggatcacaaccccaccatgaaccttattaccggggtacccaactccatgctcaacagtccccaggtacagcccaccctgcgtcgcaaccaggaacagctctacagcttcctggagcgccactcgccctacttccgcagccacagtgcgcagattaggagcgccacttctttttgtcacttgaaaaacatgtaaaaataatgtactagagacactttcaataaaggcaaatgcttttatttgtacactctcgggtgattatttacccccacccttgccgtctgcgccgtttaaaaatcaaaggggttctgccgcgcatcgctatgcgccactggcagggacacgttgcgatactggtgtttagtgctccacttaaactcaggcacaaccatccgcggcagctcggtgaagttttcactccacaggctgcgcaccatcaccaacgcgtttagcaggtcgggcgccgatatcttgaagtcgcagttggggcctccgccctgcgcgcgcgagttgcgatacacagggttgcagcactggaacactatcagcgccgggtggtgcacgctggccagcacgctcttgtcggagatcagatccgcgtccaggtcctccgcgttgctcagggcgaacggagtcaactttggtagctgccttcccaaaaagggcgcgtgcccaggctttgagttgcactcgcaccgtagtggcatcaaaaggtgaccgtgcccggtctgggcgttaggatacagcgcctgcataaaagccttgatctgcttaaaagccacctgagcctttgcgccttcagagaagaacatgccgcaagacttgccggaaaactgattggccggacaggccgcgtcgtgcacgcagcaccttgcgtcggtgttggagatctgcaccacatttcggccccaccggttcttcacgatcttggccttgctagactgctccttcagcgcgcgctgcccgttttcgctcgtcacatccatttcaatcacgtgctccttatttatcataatgcttccgtgtagacacttaagctcgccttcgatctcagcgcagcggtgcagccacaacgcgcagcccgtgggctcgtgatgcttgtaggtcacctctgcaaacgactgcaggtacgcctgcaggaatcgccccatcatcgtcacaaaggtcttgttgctggtgaaggtcagctgcaacccgcggtgctcctcgttcagccaggtcttgcatacggccgccagagcttccacttggtcaggcagtagtttgaagttcgcctttagatcgttatccacgtggtacttgtccatcagcgcgcgcgcagcctccatgcccttctcccacgcagacacgatcggcacactcagcgggttcatcaccgtaatttcactttccgcttcgctgggctcttcctcttcctcttgcgtccgcataccacgcgccactgggtcgtcttcattcagccgccgcactgtgcgcttacctcctttgccatgcttgattagcaccggtgggttgctgaaacccaccatttgtagcgccacatcttctctttcttcctcgctgtccacgattacctctggtgatggcgggcgctcgggcttgggagaagggcgcttctttttcttcttgggcgcaatggccaaatccgccgccgaggtcgatggccgcgggctgggtgtgcgcggcaccagcgcgtcttgtgatgagtcttcctcgtcctcggactcgatacgccgcctcatccgcttttttgggggcgcccggggaggcggcggcgacggggacggggacgacacgtcctccatggttgggggacgtcgcgccgcaccgcgtccgcgctcgggggtggtttcgcgctgctcctcttcccgactggccatttccttctcctataggcagaaaaagatcatggagtcagtcgagaagaaggacagcctaaccgccccctctgagttcgccaccaccgcctccaccgatgccgccaacgcgcctaccaccttccccgtcgaggcacccccgcttgaggaggaggaagtgattatcgagcaggacccaggttttgtaagcgaagacgacgaggaccgctcagtaccaacagaggataaaaagcaagaccaggacaacgcagaggcaaacgaggaacaagtcgggcggggggacgaaaggcatggcgactacctagatgtgggagacgacgtgctgttgaagcatctgcagcgccagtgcgccattatctgcgacgcgttgcaagagcgcagcgatgtgcccctcgccatagcggatgtcagccttgcctacgaacgccacctattctcaccgcgcgtaccccccaaacgccaagaaaacggcacatgcgagcccaacccgcgcctcaacttctaccccgtatttgccgtgccagaggtgcttgccacctatcacatctttttccaaaactgcaagatacccctatcctgccgtgccaaccgcagccgagcggacaagcagctggccttgcggcagggcgctgtcatacctgatatcgcctcgctcaacgaagtgccaaaaatctttgagggtcttggacgcgacgagaagcgcgcggcaaacgctctgcaacaggaaaacagcgaaaatgaaagtcactctggagtgttggtggaactcgagggtgacaacgcgcgcctagccgtactaaaacgcagcatcgaggtcacccactttgcctacccggcacttaacctaccccccaaggtcatgagcacagtcatgagtgagctgatcgtgcgccgtgcgcagcccctggagagggatgcaaatttgcaagaacaaacagaggagggcctacccgcagttggcgacgagcagctagcgcgctggcttcaaacgcgcgagcctgccgacttggaggagcgacgcaaactaatgatggccgcagtgctcgttaccgtggagcttgagtgcatgcagcggttctttgctgacccggagatgcagcgcaagctagaggaaacattgcactacacctttcgacagggctacgtacgccaggcctgcaagatctccaacgtggagctctgcaacctggtctcctaccttggaattttgcacgaaaaccgccttgggcaaaacgtgcttcattccacgctcaagggcgaggcgcgccgcgactacgtccgcgactgcgtttacttatttctatgctacacctggcagacggccatgggcgtttggcagcagtgcttggaggagtgcaacctcaaggagctgcagaaactgctaaagcaaaacttgaaggacctatggacggccttcaacgagcgctccgtggccgcgcacctggcggacatcattttccccgaacgcctgcttaaaaccctgcaacagggtctgccagacttcaccagtcaaagcatgttgcagaactttaggaactttatcctagagcgctcaggaatcttgcccgccacctgctgtgcacttcctagcgactttgtgcccattaagtaccgcgaatgccctccgccgctttggggccactgctaccttctgcagctagccaactaccttgcctaccactctgacataatggaagacgtgagcggtgacggtctactggagtgtcactgtcgctgcaacctatgcaccccgcaccgctccctggtttgcaattcgcagctgcttaacgaaagtcaaattatcggtacctttgagctgcagggtccctcgcctgacgaaaagtccgcggctccggggttgaaactcactccggggctgtggacgtcggcttaccttcgcaaatttgtacctgaggactaccacgcccacgagattaggttctacgaagaccaatcccgcccgcctaatgcggagcttaccgcctgcgtcattacccagggccacattcttggccaattgcaagccatcaacaaagcccgccaagagtttctgctacgaaagggacggggggtttacttggacccccagtccggcgaggagctcaacccaatccccccgccgccgcagccctatcagcagcagccgcgggcccttgcttcccaggatggcacccaaaaagaagctgcagctgccgccgccacccacggacgaggaggaatactgggacagtcaggcagaggaggttttggacgaggaggaggaggacatgatggaagactgggagagcctagacgaggaagcttccgaggtcgaagaggtgtcagacgaaacaccgtcaccctcggtcgcattcccctcgccggcgccccagaaatcggcaaccggttccagcatggctacaacctccgctcctcaggcgccgccggcactgcccgttcgccgacccaaccgtagatgggacaccactggaaccagggccggtaagtccaagcagccgccgccgttagcccaagagcaacaacagcgccaaggctaccgctcatggcgcgggcacaagaacgccatagttgcttgcttgcaagactgtgggggcaacatctccttcgcccgccgctttcttctctaccatcacggcgtggccttcccccgtaacatcctgcattactaccgtcatctctacagcccatactgcaccggcggcagcggcagcaacagcagcggccacacagaagcaaaggcgaccggatagcaagactctgacaaagcccaagaaatccacagcggcggcagcagcaggaggaggagcgctgcgtctggcgcccaacgaacccgtatcgacccgcgagcttagaaacaggatttttcccactctgtatgctatatttcaacagagcaggggccaagaacaagagctgaaaataaaaaacaggtctctgcgatccctcacccgcagctgcctgtatcacaaaagcgaagatcagcttcggcgcacgctggaagacgcggaggctctcttcagtaaatactgcgcgctgactcttaaggactagtttcgcgccctttctcaaatttaagcgcgaaaactacgtcatctccagcggccacacccggcgccagcacctgttgtcagcgccattatgagcaaggaaattcccacgccctacatgtggagttaccagccacaaatgggacttgcggctggagctgcccaagactactcaacccgaataaactacatgagcgcgggaccccacatgatatcccgggtcaacggaatacgcgcccaccgaaaccgaattctcctggaacaggcggctattaccaccacacctcgtaataaccttaatccccgtagttggcccgctgccctggtgtaccaggaaagtcccgctcccaccactgtggtacttcccagagacgcccaggccgaagttcagatgactaactcaggggcgcagcttgcgggcggctttcgtcacagggtgcggtcgcccgggcagggtataactcacctgacaatcagagggcgaggtattcagctcaacgacgagtcggtgagctcctcgcttggtctccgtccggacgggacatttcagatcggcggcgccggccgctcttcattcacgcctcgtcaggcaatcctaactctgcagacctcgtcctctgagccgcgctctggaggcattggaactctgcaatttattgaggagtttgtgccatcggtctactttaaccccttctcgggacctcccggccactatccggatcaatttattcctaactttgacgcggtaaaggactcggcggacggctacgactgaatgttaagtggagaggcagagcaactgcgcctgaaacacctggtccactgtcgccgccacaagtgctttgcccgcgactccggtgagttttgctactttgaattgcccgaggatcatatcgagggcccggcgcacggcgtccggcttaccgcccagggagagcttgcccgtagcctgattcgggagtttacccagcgccccctgctagttgagcgggacaggggaccctgtgttctcactgtgatttgcaactgtcctaaccctggattacatcaagatcctctagttaatgtcaggtcgcctaagtcgattaactagagtacccggggatcttattccctttaactaataaaaaaaaataataaagcatcacttacttaaaatcagttagcaaatttctgtccagtttattcagcagcacctccttgccctcctcccagctctggtattgcagcttcctcctggctgcaaactttctccacaatctaaatggaatgtcagtttcctcctgttcctgtccatccgcacccactatcttcatgttgttgcagatgaagcgcgcaagaccgtctgaagataccttcaaccccgtgtatccatatgacacggaaaccggtcctccaactgtgccttttcttactcctccctttgtatcccccaatgggtttcaagagagtccccctggggtactctctttgcgcctatccgaacctctagttacctccaatggcatgcttgcgctcaaaatgggcaacggcctctctctggacgaggccggcaaccttacctcccaaaatgtaaccactgtgagcccacctctcaaaaaaaccaagtcaaacataaacctggaaatatctgcacccctcacagttacctcagaagccctaactgtggctgccgccgcacctctaatggtcgcgggcaacacactcaccatgcaatcacaggccccgctaaccgtgcacgactccaaacttagcattgccacccaaggacccctcacagtgtcagaaggaaagctagccctgcaaacatcaggccccctcaccaccaccgatagcagtacccttactatcactgcctcaccccctctaactactgccactggtagcttgggcattgacttgaaagagcccatttatacacaaaatggaaaactaggactaaagtacggggctcctttgcatgtaacagacgacctaaacactttgaccgtagcaactggtccaggtgtgactattaataatacttccttgcaaactaaagttactggagccttgggttttgattcacaaggcaatatgcaacttaatgtagcaggaggactaaggattgattctcaaaacagacgccttatacttgatgttagttatccgtttgatgctcaaaaccaactaaatctaagactaggacagggccctctttttataaactcagcccacaacttggatattaactacaacaaaggcctttacttgtttacagcttcaaacaattccaaaaagcttgaggttaacctaagcactgccaaggggttgatgtttgacgctacagccatagccattaatgcaggagatgggcttgaatttggttcacctaatgcaccaaacacaaatcccctcaaaacaaaaattggccatggcctagaatttgattcaaacaaggctatggttcctaaactaggaactggccttagttttgacagcacaggtgccattacagtaggaaacaaaaataatgataagctaactttgtggaccggaataaaccctccacctaactgtcaaattgtggaaaacactaatacaaatgatggcaaacttactttagtattagtaaaaaatggagggcttgttaatggctacgtgtctctagttggtgtatcagacactgtgaaccaaatgttcacacaaaagacagcaaacatccaattaagattatattttgactcttctggaaatctattaactgaggaatcagacttaaaaattccacttaaaaataaatcttctacagcgaccagtgaaactgtagccagcagcaaagcctttatgccaagtactacagcttatcccttcaacaccactactagggatagtgaaaactacattcatggaatatgttactacatgactagttatgatagaagtctatttcccttgaacatttctataatgctaaacagccgtatgatttcttccaatgttgcctatgccatacaatttgaatggaatctaaatgcaagtgaatctccagaaagcaacatagctacgctgaccacatccccctttttcttttcttacattacagaagacgacaactaaagaatcgtttgtgttatgtttcaacgtgtttatttttcaattgcagaaaatttcaagtcatttttcattcagtagtatagccccaccaccacatagcttatacagatcaccgtaccttaatcaaactcacagaaccctagtattcaacctgccacctccctcccaacacacagagtacacagtcctttctccccggctggccttaaaaagcatcatatcatgggtaacagacatattcttaggtgttatattccacacggtttcctgtcgagccaaacgctcatcagtgatattaataaactccccgggcagctcacttaagttcatgtcgctgtccagctgctgagccacaggctgctgtccaacttgcggttgcttaacgggcggcgaaggagaagtccacgctcactgattaaacatggcgccatccaccaccatcctaaaccagctggccaaaacctgcccgccggctatacactgcagggaaccgggactggaacaatgacagtggagagcccaggactcgtaaccatggatcatcatgctcgtcatgatatcaatgttggcacaacacaggcacacgtgcatacacttcctcaggattacaagctcctcccgcgttagaaccatatcccagggaacaacccattcctgaatcagcgtaaatcccacactgcagggaagacctcgcacgtaactcacgttgtgcattgtcaaagtgttacattcgggcagcagcggatgatcctccagtatggtagcgcgggtttctgtctcaaaaggaggtagacgatccctactgtacggagtgcgccgagacaaccgagatcgtgttggtcgtagtgtcatgccaaatggaacgccggacgtagtcatatttcctgaagcaaaaccaggtgcgggcgtgacaaacagatctgcgtctccggtctcgccgcttagatcgctctgtgtagtagttgtagtatatccactctctcaaagcatccaggcgccccctggcttcgggttctatgtaaactccttcatgcgccgctgccctgataacatccaccaccgcagaataagccacacccagccaacctacacattcgttctgcgagtcacacacgggaggagcgggaagagctggaagaaccatgtttttttttttattccaaaagattatccaaaacctcaaaatgaagatctattaagtgaacgcgctcccctccggtggcgtggtcaaactctacagccaaagaacagataatggcatttgtaagatgttgcacaatggcttccaaaaggcaaacggccctcacgtccaagtggacgtaaaggctaaacccttcagggtgaatctcctctataaacattccagcaccttcaaccatgcccaaataattctcatctcgccaccttctcaatatatctctaagcaaatcccgaatattaagtccggccattgtaaaaatctgctccagagcgccctccaccttcagcctcaagcagcgaatcatgattgcaaaaattcaggttcctcacagacctgtataagattcaaaagcggaacattaacaaaaataccgcgatcccgtaggtcccttcgcagggccagctgaacataatcgtgcaggtctgcacggaccagcgcggccacttccccgccaggaaccatgacaaaagaacccacactgattatgacacgcatactcggagctatgctaaccagcgtagccccgatgtaagcttgttgcatgggcggcgatataaaatgcaaggtgctgctcaaaaaatcaggcaaagcctcgcgcaaaaaagaaagcacatcgtagtcatgctcatgcagataaaggcaggtaagctccggaaccaccacagaaaaagacaccatttttctctcaaacatgtctgcgggtttctgcataaacacaaaataaaataacaaaaaaacatttaaacattagaagcctgtcttacaacaggaaaaacaacccttataagcataagacggactacggccatgccggcgtgaccgtaaaaaaactggtcaccgtgattaaaaagcaccaccgacagctcctcggtcatgtccggagtcataatgtaagactcggtaaacacatcaggttgattcacatcggtcagtgctaaaaagcgaccgaaatagcccgggggaatacatacccgcaggcgtagagacaacattacagcccccataggaggtataacaaaattaataggagagaaaaacacataaacacctgaaaaaccctcctgcctaggcaaaatagcaccctcccgctccagaacaacatacagcgcttccacagcggcagccataacagtcagccttaccagtaaaaaagaaaacctattaaaaaaacaccactcgacacggcaccagctcaatcagtcacagtgtaaaaaagggccaagtgcagagcgagtatatataggactaaaaaatgacgtaacggttaaagtccacaaaaaacacccagaaaaccgcacgcgaacctacgcccagaaacgaaagccaaaaaacccacaacttcctcaaatcgtcacttccgttttcccacgttacgtcacttcccattttaagaaaactacaattcccaacacatacaagttactccgccctaaaacctacgtcacccgccccgttcccacgccccgcgccacgtcacaaactccaccccctcattatcatattggcttcaatccaaaataaggtatattattgatgatg

SEQ ID NO: 40 - DNA, 36445 bp, Artificial Sequence
  Adk35F2-S04/E4O6(mPGK)(nokozak)-E4dl-355(E4re#38)
ttaattaacatcatcaataatataccttattttggattgaagccaatatgataatgagggggtggagtttgtgacgtggcgcggggcgtgggaacggggcgggtgacgtagtagtgtggcggaagtgtgatgttgcaagtgtggcggaacacatgtaagcgacggatgtggcaaaagtgacgtttttggtgtgcgccggtgtacacaggaagtgacaattttcgcgcggttttaggcggatgttgtagtaaatttgggcgtaaccgagtaagatttggccattttcgcgggaaaactgaataagaggaagtgaaatctgaataattttgtgttactcatagcgcgtaataatttctgtaatagtaatcaattacggggtcattagttcatagcccatatatggagttccgcgttacataacttacggtaaatggcccgcctggctgaccgcccaacgacccccgcccattgacgtcaataatgacgtatgttcccatagtaacgccaatagggactttccattgacgtcaatgggtggagtatttacggtaaactgcccacttggcagtacatcaagtgtatcatatgccaagtacgccccctattgacgtcaatgacggtaaatggcccgcctggcattatgcccagtacatgaccttatgggactttcctacttggcagtacatctacgtattagtcatcgctattaccatggtgatgcggttttggcagtacatcaatgggcgtggatagcggtttgactcacggggatttccaagtctccaccccattgacgtcaatgggagtttgttttggcaccaaaatcaacgggactttccaaaatgtcgtaacaactccgccccattgacgcaaatgggcggtaggcgtgtacggtgggaggtctatataagcagagctctccctatcagtgatagagatctccctatcagtgatagagatcgtcgacgagctcgtttagtgaaccgtcagatcgcctggagacgccatccacgctgttttgacctccatagaagacaccgggaccgatccagcctccgatttgccaccatgtttgtgttcctggtgctgctgccactggtgtccagccagtgtgtgaacctgaccaccaggacccaacttcctcctgcctacaccaactccttcaccaggggagtctactaccctgacaaggtgttcaggtcctctgtgctgcacagcacccaggacctgttcctgccattcttcagcaatgtgacctggttccatgccatccatgtgtctggcaccaatggcaccaagaggtttgacaaccctgtgctgccattcaatgatggagtctactttgccagcacagagaagagcaacatcatcaggggctggatttttggcaccaccctggacagcaagacccagtccctgctgattgtgaacaatgccaccaatgtggtgattaaggtgtgtgagttccagttctgtaatgacccattcctgggagtctactaccacaagaacaacaagtcctggatggagtctgagttcagggtctactcctctgccaacaactgtacctttgaatatgtgagccaaccattcctgatggacttggagggcaagcagggcaacttcaagaacctgagggagtttgtgttcaagaacattgatggctacttcaagatttacagcaaacacacaccaatcaacctggtgagggacctgccacagggcttctctgccttggaaccactggtggacctgccaattggcatcaacatcaccaggttccagaccctgctggctctgcacaggtcctacctgacacctggagactcctcctctggctggacagcaggagcagcagcctactatgtgggctacctccaaccaaggaccttcctgctgaaatacaatgagaatggcaccatcacagatgctgtggactgtgccctggacccactgtctgagaccaagtgtaccctgaaatccttcacagtggagaagggcatctaccagaccagcaacttcagggtccaaccaacagagagcattgtgaggtttccaaacatcaccaacctgtgtccatttggagaggtgttcaatgccaccaggtttgcctctgtctatgcctggaacaggaagaggattagcaactgtgtggctgactactctgtgctctacaactctgcctccttcagcaccttcaagtgttatggagtgagcccaaccaaactgaatgacctgtgtttcaccaatgtctatgctgactcctttgtgattaggggagatgaggtgagacagattgcccctggacaaacaggcaagattgctgactacaactacaaactgcctgatgacttcacaggctgtgtgattgcctggaacagcaacaacctggacagcaaggtgggaggcaactacaactacctctacagactgttcaggaagagcaacctgaaaccatttgagagggacatcagcacagagatttaccaggctggcagcacaccatgtaatggagtggagggcttcaactgttactttccactccaatcctatggcttccaaccaaccaatggagtgggctaccaaccatacagggtggtggtgctgtcctttgaactgctccatgcccctgccacagtgtgtggaccaaagaagagcaccaacctggtgaagaacaagtgtgtgaacttcaacttcaatggactgacaggcacaggagtgctgacagagagcaacaagaagttcctgccattccaacagtttggcagggacattgctgacaccacagatgctgtgagggacccacagaccttggagattctggacatcacaccatgttcctttggaggagtgtctgtgattacacctggcaccaacaccagcaaccaggtggctgtgctctaccaggatgtgaactgtactgaggtgcctgtggctatccatgctgaccaacttacaccaacctggagggtctacagcacaggcagcaatgtgttccagaccagggctggctgtctgattggagcagagcatgtgaacaactcctatgagtgtgacatcccaattggagcaggcatctgtgcctcctaccagacccagaccggtggcggtgggtcgaggtctgtggcaagccagagcatcattgcctacacaatgagtctgggagcagagaactctgtggcttacagcaacaacagcattgccatcccaaccaacttcaccatctctgtgaccacagagattctgcctgtgagtatgaccaagacctctgtggactgtacaatgtatatctgtggagacagcacagagtgtagcaacctgctgctccaatatggctccttctgtacccaacttaacagggctctgacaggcattgctgtggaacaggacaagaacacccaggaggtgtttgcccaggtgaagcagatttacaagacacctccaatcaaggactttggaggcttcaacttcagccagattctgcctgacccaagcaagccaagcaagaggtccttcattgaggacctgctgttcaacaaggtgaccctggctgatgctggcttcatcaagcaatatggagactgtctgggagacattgctgccagggacctgatttgtgcccagaagttcaatggactgacagtgctgcctccactgctgacagatgagatgattgcccaatacacctctgccctgctggctggcaccatcacctctggctggacctttggagcaggagcagccctccaaatcccatttgctatgcagatggcttacaggttcaatggcattggagtgacccagaatgtgctctatgagaaccagaaactgattgccaaccagttcaactctgccattggcaagattcaggactccctgtccagcacagcctctgccctgggcaaactccaagatgtggtgaaccagaatgcccaggctctgaacaccctggtgaagcaactttccagcaactttggagccatctcctctgtgctgaatgacatcctgagcagactggacaaggtggaggctgaggtccagattgacagactgattacaggcagactccaatccctccaaacctatgtgacccaacaacttatcagggctgctgagattagggcatctgccaacctggctgccaccaagatgagtgagtgtgtgctgggacaaagcaagagggtggacttctgtggcaagggctaccacctgatgagttttccacagtctgcccctcatggagtggtgttcctgcatgtgacctatgtgcctgcccaggagaagaacttcaccacagcccctgccatctgccatgatggcaaggctcactttccaagggagggagtgtttgtgagcaatggcacccactggtttgtgacccagaggaacttctatgaaccacagattatcaccacagacaacacctttgtgtctggcaactgtgatgtggtgattggcattgtgaacaacacagtctatgacccactccaacctgaactggactccttcaaggaggaactggacaaatacttcaagaaccacaccagccctgatgtggacctgggagacatctctggcatcaatgcctctgtggtgaacatccagaaggagattgacagactgaatgaggtggctaagaacctgaatgagtccctgattgacctccaagaactgggcaaatatgaacaatacatcaagtggccatgaaaattgatcataatcagccataccacatttgtagaggttttacttgctttaaaaaacctcccacacctccccctgaacctgaaacataaaatgaatgcaattgttgttgttaacttgtttattgcagcttataatggttacaaataaagcaatagcatcacaaatttcacaaataaagcatttttttcactgcattctagttgtggtttgtccaaactcatcaatgtatcttaacgcggatcgggtaggggaggcgcttttcccaaggcagtctggagcatgcgctttagcagccccgctgggcacttggcgctacacaagtggcctctggcctcgcacacattccacatccaccggtaggcgccaaccggctccgttctttggtggccccttcgcgccaccttctactcctcccctagtcaggaagttcccccccgccccgcagctcgcgtcgtgcaggacgtgacaaatggaagtagcacgtctcactagtctcgtgcagatggacagcaccgctgagcaatggaagcgggtaggcctttggggcagcggccaatagcagctttgctccttcgctttctgggctcagaggctgggaaggggtgggtccgggggcgggctcaggggcgggctcaggggcggggcgggcgcccgaaggtcctccggaggcccggcattctgcacgcttcaaaagcgcacgtctgccgcgctgttctcctcttcctcatctccgggcctttcgaaactaccccaagctggcctctgaggccaccatggctcgagtttatgactacgtccggcgttccatttggcatgacactacgaccaacacgatctcggttgtctcggcgcactccgtacagtagggatcgtctacctccttttgagacagaaacccgcgctaccatactggaggatcatccgctgctgcccgaatgtaacactttgacaatgcacaacgtgagttacgtgcgaggtcttccctgcagtgtgggatttacgctgattcaggaatgggttgttccctgggatatggttctaacgcgggaggagcttgtaatcctgaggaagtgtatgcacgtgtgcctgtgttgtgccaacattgatatcatgacgagcatgatgatccatggttacgagtcctgggctctccactgtcattgttccagtcccggttccctgcagtgtatagccggcgggcaggttttggccagctggtttaggatggtggtggatggcgccatgtttaatcagaggtttatatggtaccgggaggtggtgaattacaacatgccaaaagaggtaatgtttatgtccagcgtgtttatgaggggtcgccacttaatctacctgcgcttgtggtatgatggccacgtgggttctgtggtccccgccatgagctttggatacagcgccttgcactgtgggattttgaacaatattgtggtgctgtgctgcagttactgtgctgatttaagtgagatcagggtgcgctgctgtgcccggaggacaaggcgccttatgctgcgggcggtgcgaatcatcgctgaggagaccactgccatgttgtattcctgcaggacggagcggcggcggcagcagtttattcgcgcgctgctgcagcaccaccgccctatcctgatgcacgattatgactctacccccatgtagaagcttggggatcaattctctagagctcgctgatcagcctcgactgtgccttctagttgccagccatctgttgtttgcccctcccccgtgccttccttgaccctggaaggtgccactcccactgtcctttcctaataaaatgaggaaattgcatcgcattgtctgagtaggtgtcattctattctggggggtggggtggggcaggacagcaagggggaggattgggaagacaatagcaggcatgctggggatgcggtgggctctatggcttctgaggaaattgggcgtggcttaagggtgggaaagaatatataaggtgggggtcttatgtagttttgtatctgttttgcagcagccgccgccgccatgagcaccaactcgtttgatggaagcattgtgagctcatatttgacaacgcgcatgcccccatgggccggggtgcgtcagaatgtgatgggctccagcattgatggtcgccccgtcctgcccgcaaactctactaccttgacctacgagaccgtgtctggaacgccgttggagactgcagcctccgccgccgcttcagccgctgcagccaccgcccgcgggattgtgactgactttgctttcctgagcccgcttgcaagcagtgcagcttcccgttcatccgcccgcgatgacaagttgacggctcttttggcacaattggattctttgacccgggaacttaatgtcgtttctcagcagctgttggatctgcgccagcaggtttctgccctgaaggcttcctcccctcccaatgcggtttaaaacataaataaaaaaccagactctgtttggatttggatcaagcaagtgtcttgctgtctttatttaggggttttgcgcgcgcggtaggcccgggaccagcggtctcggtcgttgagggtcctgtgtattttttccaggacgtggtaaaggtgactctggatgttcagatacatgggcataagcccgtctctggggtggaggtagcaccactgcagagcttcatgctgcggggtggtgttgtagatgatccagtcgtagcaggagcgctgggcgtggtgcctaaaaatgtctttcagtagcaagctgattgccaggggcaggcccttggtgtaagtgtttacaaagcggttaagctgggatgggtgcatacgtggggatatgagatgcatcttggactgtatttttaggttggctatgttcccagccatatccctccggggattcatgttgtgcagaaccaccagcacagtgtatccggtgcacttgggaaatttgtcatgtagcttagaaggaaatgcgtggaagaacttggagacgcccttgtgacctccaagattttccatgcattcgtccataatgatggcaatgggcccacgggcggcggcctgggcgaagatatttctgggatcactaacgtcatagttgtgttccaggatgagatcgtcataggccatttttacaaagcgcgggcggagggtgccagactgcggtataatggttccatccggcccaggggcgtagttaccctcacagatttgcatttcccacgctttgagttcagatggggggatcatgtctacctgcggggcgatgaagaaaacggtttccggggtaggggagatcagctgggaagaaagcaggttcctgagcagctgcgacttaccgcagccggtgggcccgtaaatcacacctattaccgggtgcaactggtagttaagagagctgcagctgccgtcatccctgagcaggggggccacttcgttaagcatgtccctgactcgcatgttttccctgaccaaatccgccagaaggcgctcgccgcccagcgatagcagttcttgcaaggaagcaaagtttttcaacggtttgagaccgtccgccgtaggcatgcttttgagcgtttgaccaagcagttccaggcggtcccacagctcggtcacctgctctacggcatctcgatccagcatatctcctcgtttcgcgggttggggcggctttcgctgtacggcagtagtcggtgctcgtccagacgggccagggtcatgtctttccacgggcgcagggtcctcgtcagcgtagtctgggtcacggtgaaggggtgcgctccgggctgcgcgctggccagggtgcgcttgaggctggtcctgctggtgctgaagcgctgccggtcttcgccctgcgcgtcggccaggtagcatttgaccatggtgtcatagtccagcccctccgcggcgtggcccttggcgcgcagcttgcccttggaggaggcgccgcacgaggggcagtgcagacttttgagggcgtagagcttgggcgcgagaaataccgattccggggagtaggcatccgcgccgcaggccccgcagacggtctcgcattccacgagccaggtgagctctggccgttcggggtcaaaaaccaggtttcccccatgctttttgatgcgtttcttacctctggtttccatgagccggtgtccacgctcggtgacgaaaaggctgtccgtgtccccgtatacagacttgagaggcctgtcctcgagcggtgttccgcggtcctcctcgtatagaaactcggaccactctgagacaaaggctcgcgtccaggccagcacgaaggaggctaagtgggaggggtagcggtcgttgtccactagggggtccactcgctccagggtgtgaagacacatgtcgccctcttcggcatcaaggaaggtgattggtttgtaggtgtaggccacgtgaccgggtgttcctgaaggggggctataaaagggggtgggggcgcgttcgtcctcactctcttccgcatcgctgtctgcgagggccagctgttggggtgagtactccctctgaaaagcgggcatgacttctgcgctaagattgtcagtttccaaaaacgaggaggatttgatattcacctggcccgcggtgatgcctttgagggtggccgcatccatctggtcagaaaagacaatctttttgttgtcaagcttggtggcaaacgacccgtagagggcgttggacagcaacttggcgatggagcgcagggtttggtttttgtcgcgatcggcgcgctccttggccgcgatgtttagctgcacgtattcgcgcgcaacgcaccgccattcgggaaagacggtggtgcgctcgtcgggcaccaggtgcacgcgccaaccgcggttgtgcagggtgacaaggtcaacgctggtggctacctctccgcgtaggcgctcgttggtccagcagaggcggccgcccttgcgcgagcagaatggcggtagggggtctagctgcgtctcgtccggggggtctgcgtccacggtaaagaccccgggcagcaggcgcgcgtcgaagtagtctatcttgcatccttgcaagtctagcgcctgctgccatgcgcgggcggcaagcgcgcgctcgtatgggttgagtgggggaccccatggcatggggtgggtgagcgcggaggcgtacatgccgcaaatgtcgtaaacgtagaggggctctctgagtattccaagatatgtagggtagcatcttccaccgcggatgctggcgcgcacgtaatcgtatagttcgtgcgagggagcgaggaggtcgggaccgaggttgctacgggcgggctgctctgctcggaagactatctgcctgaagatggcatgtgagttggatgatatggttggacgctggaagacgttgaagctggcgtctgtgagacctaccgcgtcacgcacgaaggaggcgtaggagtcgcgcagcttgttgaccagctcggcggtgacctgcacgtctagggcgcagtagtccagggtttccttgatgatgtcatacttatcctgtcccttttttttccacagctcgcggttgaggacaaactcttcgcggtctttccagtactcttggatcggaaacccgtcggcctccgaacggtaagagcctagcatgtagaactggttgacggcctggtaggcgcagcatcccttttctacgggtagcgcgtatgcctgcgcggccttccggagcgaggtgtgggtgagcgcaaaggtgtccctgaccatgactttgaggtactggtatttgaagtcagtgtcgtcgcatccgccctgctcccagagcaaaaagtccgtgcgctttttggaacgcggatttggcagggcgaaggtgacatcgttgaagagtatctttcccgcgcgaggcataaagttgcgtgtgatgcggaagggtcccggcacctcggaacggttgttaattacctgggcggcgagcacgatctcgtcaaagccgttgatgttgtggcccacaatgtaaagttccaagaagcgcgggatgcccttgatggaaggcaattttttaagttcctcgtaggtgagctcttcaggggagctgagcccgtgctctgaaagggcccagtctgcaagatgagggttggaagcgacgaatgagctccacaggtcacgggccattagcatttgcaggtggtcgcgaaaggtcctaaactggcgacctatggccattttttctggggtgatgcagtagaaggtaagcgggtcttgttcccagcggtcccatccaaggttcgcggctaggtctcgcgcggcagtcactagaggctcatctccgccgaacttcatgaccagcatgaagggcacgagctgcttcccaaaggcccccatccaagtataggtctctacatcgtaggtgacaaagagacgctcggtgcgaggatgcgagccgatcgggaagaactggatctcccgccaccaattggaggagtggctattgatgtggtgaaagtagaagtccctgcgacgggccgaacactcgtgctggcttttgtaaaaacgtgcgcagtactggcagcggtgcacgggctgtacatcctgcacgaggttgacctgacgaccgcgcacaaggaagcagagtgggaatttgagcccctcgcctggcgggtttggctggtggtcttctacttcggctgcttgtccttgaccgtctggctgctcgaggggagttacggtggatcggaccaccacgccgcgcgagcccaaagtccagatgtccgcgcgcggcggtcggagcttgatgacaacatcgcgcagatgggagctgtccatggtctggagctcccgcggcgtcaggtcaggcgggagctcctgcaggtttacctcgcatagacgggtcagggcgcgggctagatccaggtgatacctaatttccaggggctggttggtggcggcgtcgatggcttgcaagaggccgcatccccgcggcgcgactacggtaccgcgcggcgggcggtgggccgcgggggtgtccttggatgatgcatctaaaagcggtgacgcgggcgagcccccggaggtagggggggctccggacccgccgggagagggggcaggggcacgtcggcgccgcgcgcgggcaggagctggtgctgcgcgcgtaggttgctggcgaacgcgacgacgcggcggttgatctcctgaatctggcgcctctgcgtgaagacgacgggcccggtgagcttgaacctgaaagagagttcgacagaatcaatttcggtgtcgttgacggcggcctggcgcaaaatctcctgcacgtctcctgagttgtcttgataggcgatctcggccatgaactgctcgatctcttcctcctggagatctccgcgtccggctcgctccacggtggcggcgaggtcgttggaaatgcgggccatgagctgcgagaaggcgttgaggcctccctcgttccagacgcggctgtagaccacgcccccttcggcatcgcgggcgcgcatgaccacctgcgcgagattgagctccacgtgccgggcgaagacggcgtagtttcgcaggcgctgaaagaggtagttgagggtggtggcggtgtgttctgccacgaagaagtacataacccagcgtcgcaacgtggattcgttgatatcccccaaggcctcaaggcgctccatggcctcgtagaagtccacggcgaagttgaaaaactgggagttgcgcgccgacacggttaactcctcctccagaagacggatgagctcggcgacagtgtcgcgcacctcgcgctcaaaggctacaggggcctcttcttcttcttcaatctcctcttccataagggcctccccttcttcttcttctggcggcggtgggggaggggggacacggcggcgacgacggcgcaccgggaggcggtcgacaaagcgctcgatcatctccccgcggcgacggcgcatggtctcggtgacggcgcggccgttctcgcgggggcgcagttggaagacgccgcccgtcatgtcccggttatgggttggcggggggctgccatgcggcagggatacggcgctaacgatgcatctcaacaattgttgtgtaggtactccgccgccgagggacctgagcgagtccgcatcgaccggatcggaaaacctctcgagaaaggcgtctaaccagtcacagtcgcaaggtaggctgagcaccgtggcgggcggcagcgggcggcggtcggggttgtttctggcggaggtgctgctgatgatgtaattaaagtaggcggtcttgagacggcggatggtcgacagaagcaccatgtccttgggtccggcctgctgaatgcgcaggcggtcggccatgccccaggcttcgttttgacatcggcgcaggtctttgtagtagtcttgcatgagcctttctaccggcacttcttcttctccttcctcttgtcctgcatctcttgcatctatcgctgcggcggcggcggagtttggccgtaggtggcgccctcttcctcccatgcgtgtgaccccgaagcccctcatcggctgaagcagggctaggtcggcgacaacgcgctcggctaatatggcctgctgcacctgcgtgagggtagactggaagtcatccatgtccacaaagcggtggtatgcgcccgtgttgatggtgtaagtgcagttggccataacggaccagttaacggtctggtgacccggctgcgagagctcggtgtacctgagacgcgagtaagccctcgagtcaaatacgtagtcgttgcaagtccgcaccaggtactggtatcccaccaaaaagtgcggcggcggctggcggtagaggggccagcgtagggtggccggggctccgggggcgagatcttccaacataaggcgatgatatccgtagatgtacctggacatccaggtgatgccggcggcggtggtggaggcgcgcggaaagtcgcggacgcggttccagatgttgcgcagcggcaaaaagtgctccatggtcgggacgctctggccggtcaggcgcgcgcaatcgttgacgctctagcgtgcaaaaggagagcctgtaagcgggcactcttccgtggtctggtggataaattcgcaagggtatcatggcggacgaccggggttcgagccccgtatccggccgtccgccgtgatccatgcggttaccgcccgcgtgtcgaacccaggtgtgcgacgtcagacaacgggggagtgctccttttggcttccttccaggcgcggcggctgctgcgctagcttttttggccactggccgcgcgcagcgtaagcggttaggctggaaagcgaaagcattaagtggctcgctccctgtagccggagggttattttccaagggttgagtcgcgggacccccggttcgagtctcggaccggccggactgcggcgaacgggggtttgcctccccgtcatgcaagaccccgcttgcaaattcctccggaaacagggacgagccccttttttgcttttcccagatgcatccggtgctgcggcagatgcgcccccctcctcagcagcggcaagagcaagagcagcggcagacatgcagggcaccctcccctcctcctaccgcgtcaggaggggcgacatccgcggttgacgcggcagcagatggtgattacgaacccccgcggcgccgggcccggcactacctggacttggaggagggcgagggcctggcgcggctaggagcgccctctcctgagcggcacccaagggtgcagctgaagcgtgatacgcgtgaggcgtacgtgccgcggcagaacctgtttcgcgaccgcgagggagaggagcccgaggagatgcgggatcgaaagttccacgcagggcgcgagctgcggcatggcctgaatcgcgagcggttgctgcgcgaggaggactttgagcccgacgcgcgaaccgggattagtcccgcgcgcgcacacgtggcggccgccgacctggtaaccgcatacgagcagacggtgaaccaggagattaactttcaaaaaagctttaacaaccacgtgcgtacgcttgtggcgcgcgaggaggtggctataggactgatgcatctgtgggactttgtaagcgcgctggagcaaaacccaaatagcaagccgctcatggcgcagctgttccttatagtgcagcacagcagggacaacgaggcattcagggatgcgctgctaaacatagtagagcccgagggccgctggctgctcgatttgataaacatcctgcagagcatagtggtgcaggagcgcagcttgagcctggctgacaaggtggccgccatcaactattccatgcttagcctgggcaagttttacgcccgcaagatataccataccccttacgttcccatagacaaggaggtaaagatcgaggggttctacatgcgcatggcgctgaaggtgcttaccttgagcgacgacctgggcgtttatcgcaacgagcgcatccacaaggccgtgagcgtgagccggcggcgcgagctcagcgaccgcgagctgatgcacagcctgcaaagggccctggctggcacgggcagcggcgatagagaggccgagtcctactttgacgcgggcgctgacctgcgctgggccccaagccgacgcgccctggaggcagctggggccggacctgggctggcggtggcacccgcgcgcgctggcaacgtcggcggcgtggaggaatatgacgaggacgatgagtacgagccagaggacggcgagtactaagcggtgatgtttctgatcagatgatgcaagacgcaacggacccggcggtgcgggcggcgctgcagagccagccgtccggccttaactccacggacgactggcgccaggtcatggaccgcatcatgtcgctgactgcgcgcaatcctgacgcgttccggcagcagccgcaggccaaccggctctccgcaattctggaagcggtggtcccggcgcgcgcaaaccccacgcacgagaaggtgctggcgatcgtaaacgcgctggccgaaaacagggccatccggcccgacgaggccggcctggtctacgacgcgctgcttcagcgcgtggctcgttacaacagcggcaacgtgcagaccaacctggaccggctggtgggggatgtgcgcgaggccgtggcgcagcgtgagcgcgcgcagcagcagggcaacctgggctccatggttgcactaaacgccttcctgagtacacagcccgccaacgtgccgcggggacaggaggactacaccaactttgtgagcgcactgcggctaatggtgactgagacaccgcaaagtgaggtgtaccagtctgggccagactattttttccagaccagtagacaaggcctgcagaccgtaaacctgagccaggctttcaaaaacttgcaggggctgtggggggtgcgggctcccacaggcgaccgcgcgaccgtgtctagcttgctgacgcccaactcgcgcctgttgctgctgctaatagcgcccttcacggacagtggcagcgtgtcccgggacacatacctaggtcacttgctgacactgtaccgcgaggccataggtcaggcgcatgtggacgagcatactttccaggagattacaagtgtcagccgcgcgctggggcaggaggacacgggcagcctggaggcaaccctaaactacctgctgaccaaccggcggcagaagatcccctcgttgcacagtttaaacagcgaggaggagcgcattttgcgctacgtgcagcagagcgtgagccttaacctgatgcgcgacggggtaacgcccagcgtggcgctggacatgaccgcgcgcaacatggaaccgggcatgtatgcctcaaaccggccgtttatcaaccgcctaatggactacttgcatcgcgcggccgccgtgaaccccgagtatttcaccaatgccatcttgaacccgcactggctaccgccccctggtttctacaccgggggattcgaggtgcccgagggtaacgatggattcctctgggacgacatagacgacagcgtgttttccccgcaaccgcagaccctgctagagttgcaacagcgcgagcaggcagaggcggcgctgcgaaaggaaagcttccgcaggccaagcagcttgtccgatctaggcgctgcggccccgcggtcagatgctagtagcccatttccaagcttgatagggtctcttaccagcactcgcaccacccgcccgcgcctgctgggcgaggaggagtacctaaacaactcgctgctgcagccgcagcgcgaaaaaaacctgcctccggcatttcccaacaacgggatagagagcctagtggacaagatgagtagatggaagacgtacgcgcaggagcacagggacgtgccaggcccgcgcccgcccacccgtcgtcaaaggcacgaccgtcagcggggtctggtgtgggaggacgatgactcggcagacgacagcagcgtcctggatttgggagggagtggcaacccgtttgcgcaccttcgccccaggctggggagaatgttttaaaaaaaaaaaagcatgatgcaaaataaaaaactcaccaaggccatggcaccgagcgttggttttcttgtattccccttagtatgcggcgcgcggcgatgtatgaggaaggtcctcctccctcctacgagagtgtggtgagcgcggcgccagtggcggcggcgctgggttctcccttcgatgctcccctggacccgccgtttgtgcctccgcggtacctgcggcctaccggggggagaaacagcatccgttactctgagttggcacccctattcgacaccacccgtgtgtacctggtggacaacaagtcaacggatgtggcatccctgaactaccagaacgaccacagcaactttctgaccacggtcattcaaaacaatgactacagcccgggggaggcaagcacacagaccatcaatcttgacgaccggtcgcactggggcggcgacctgaaaaccatcctgcataccaacatgccaaatgtgaacgagttcatgtttaccaataagtttaaggcgcgggtgatggtgtcgcgcttgcctactaaggacaatcaggtggagctgaaatacgagtgggtggagttcacgctgcccgagggcaactactccgagaccatgaccatagaccttatgaacaacgcgatcgtggagcactacttgaaagtgggcagacagaacggggttctggaaagcgacatcggggtaaagtttgacacccgcaacttcagactggggtttgaccccgtcactggtcttgtcatgcctggggtatatacaaacgaagccttccatccagacatcattttgctgccaggatgcggggtggacttcacccacagccgcctgagcaacttgttgggcatccgcaagcggcaacccttccaggagggctttaggatcacctacgatgatctggagggtggtaacattcccgcactgttggatgtggacgcctaccaggcgagcttgaaagatgacaccgaacagggcgggggtggcgcaggcggcagcaacagcagtggcagcggcgcggaagagaactccaacgcggcagccgcggcaatgcagccggtggaggacatgaacgatcatgccattcgcggcgacacctttgccacacgggctgaggagaagcgcgctgaggccgaagcagcggccgaagctgccgcccccgctgcgcaacccgaggtcgagaagcctcagaagaaaccggtgatcaaacccctgacagaggacagcaagaaacgcagttacaacctaataagcaatgacagcaccttcacccagtaccgcagctggtaccttgcatacaactacggcgaccctcagaccggaatccgctcatggaccctgctttgcactcctgacgtaacctgcggctcggagcaggtctactggtcgttgccagacatgatgcaagaccccgtgaccttccgctccacgcgccagatcagcaactttccggtggtgggcgccgagctgttgcccgtgcactccaagagcttctacaacgaccaggccgtctactcccaactcatccgccagtttacctctctgacccacgtgttcaatcgctttcccgagaaccagattttggcgcgcccgccagcccccaccatcaccaccgtcagtgaaaacgttcctgctctcacagatcacgggacgctaccgctgcgcaacagcatcggaggagtccagcgagtgaccattactgacgccagacgccgcacctgcccctacgtttacaaggccctgggcatagtctcgccgcgcgtcctatcgagccgcactttttgagcaagcatgtccatccttatatcgcccagcaataacacaggctggggcctgcgcttcccaagcaagatgtttggcggggccaagaagcgctccgaccaacacccagtgcgcgtgcgcgggcactaccgcgcgccctggggcgcgcacaaacgcggccgcactgggcgcaccaccgtcgatgacgccatcgacgcggtggtggaggaggcgcgcaactacacgcccacgccgccaccagtgtccacagtggacgcggccattcagaccgtggtgcgcggagcccggcgctatgctaaaatgaagagacggcggaggcgcgtagcacgtcgccaccgccgccgacccggcactgccgcccaacgcgcggcggcggccctgcttaaccgcgcacgtcgcaccggccgacgggcggccatgcgggccgctcgaaggctggccgcgggtattgtcactgtgccccccaggtccaggcgacgagcggccgccgcagcagccgcggccattagtgctatgactcagggtcgcaggggcaacgtgtattgggtgcgcgactcggttagcggcctgcgcgtgcccgtgcgcacccgccccccgcgcaactagattgcaagaaaaaactacttagactcgtactgttgtatgtatccagcggcggcggcgcgcaacgaagctatgtccaagcgcaaaatcaaagaagagatgctccaggtcatcgcgccggagatctatggccccccgaagaaggaagagcaggattacaagccccgaaagctaaagcgggtcaaaaagaaaaagaaagatgatgatgatgaacttgacgacgaggtggaactgctgcacgctaccgcgcccaggcgacgggtacagtggaaaggtcgacgcgtaaaacgtgttttgcgacccggcaccaccgtagtctttacgcccggtgagcgctccacccgcacctacaagcgcgtgtatgatgaggtgtacggcgacgaggacctgcttgagcaggccaacgagcgcctcggggagtttgcctacggaaagcggcataaggacatgctggcgttgccgctggacgagggcaacccaacacctagcctaaagcccgtaacactgcagcaggtgctgcccgcgcttgcaccgtccgaagaaaagcgcggcctaaagcgcgagtctggtgacttggcacccaccgtgcagctgatggtacccaagcgccagcgactggaagatgtcttggaaaaaatgaccgtggaacctgggctggagcccgaggtccgcgtgcggccaatcaagcaggtggcgccgggactgggcgtgcagaccgtggacgttcagatacccactaccagtagcaccagtattgccaccgccacagagggcatggagacacaaacgtccccggttgcctcagcggtggcggatgccgcggtgcaggcggtcgctgcggccgcgtccaagacctctacggaggtgcaaacggacccgtggatgtttcgcgtttcagccccccggcgcccgcgccgttcgaggaagtacggcgccgccagcgcgctactgcccgaatatgccctacatccttccattgcgcctacccccggctatcgtggctacacctaccgccccagaagacgagcaactacccgacgccgaaccaccactggaacccgccgccgccgtcgccgtcgccagcccgtgctggccccgatttccgtgcgcagggtggctcgcgaaggaggcaggaccctggtgctgccaacagcgcgctaccaccccagcatcgtttaaaagccggtctttgtggttcttgcagatatggccctcacctgccgcctccgtttcccggtgccgggattccgaggaagaatgcaccgtaggaggggcatggccggccacggcctgacgggcggcatgcgtcgtgcgcaccaccggcggcggcgcgcgtcgcaccgtcgcatgcgcggcggtatcctgcccctccttattccactgatcgccgcggcgattggcgccgtgcccggaattgcatccgtggccttgcaggcgcagagacactgattaaaaacaagttgcatgtggaaaaatcaaaataaaaagtctggactctcacgctcgcttggtcctgtaactattttgtagaatggaagacatcaactttgcgtctctggccccgcgacacggctcgcgcccgttcatgggaaactggcaagatatcggcaccagcaatatgagcggtggcgccttcagctggggctcgctgtggagcggcattaaaaatttcggttccaccgttaagaactatggcagcaaggcctggaacagcagcacaggccagatgctgagggataagttgaaagagcaaaatttccaacaaaaggtggtagatggcctggcctctggcattagcggggtggtggacctggccaaccaggcagtgcaaaataagattaacagtaagcttgatccccgccctcccgtagaggagcctccaccggccgtggagacagtgtctccagaggggcgtggcgaaaagcgtccgcgccccgacagggaagaaactctggtgacgcaaatagacgagcctccctcgtacgaggaggcactaaagcaaggcctgcccaccacccgtcccatcgcgcccatggctaccggagtgctgggccagcacacacccgtaacgctggacctgcctccccccgccgacacccagcagaaacctgtgctgccaggcccgaccgccgttgttgtaacccgtcctagccgcgcgtccctgcgccgcgccgccagcggtccgcgatcgttgcggcccgtagccagtggcaactggcaaagcacactgaacagcatcgtgggtctgggggtgcaatccctgaagcgccgacgatgcttctgatagctaacgtgtcgtatgtgtgtcatgtatgcgtccatgtcgccgccagaggagctgctgagccgccgcgcgcccgctttccaagatggctaccccttcgatgatgccgcagtggtcttacatgcacatctcgggccaggacgcctcggagtacctgagccccgggctggtgcagtttgcccgcgccaccgagacgtacttcagcctgaataacaagtttagaaaccccacggtggcgcctacgcacgacgtgaccacagaccggtcccagcgtttgacgctgcggttcatccctgtggaccgtgaggatactgcgtactcgtacaaggcgcggttcaccctagctgtgggtgataaccgtgtgctggacatggcttccacgtactttgacatccgcggcgtgctggacaggggccctacttttaagccctactctggcactgcctacaacgccctggctcccaagggtgccccaaatccttgcgaatgggatgaagctgctactgctcttgaaataaacctagaagaagaggacgatgacaacgaagacgaagtagacgagcaagctgagcagcaaaaaactcacgtatttgggcaggcgccttattctggtataaatattacaaaggagggtattcaaataggtgtcgaaggtcaaacacctaaatatgccgataaaacatttcaacctgaacctcaaataggagaatctcagtggtacgaaacagaaattaatcatgcagctgggagagtcctaaaaaagactaccccaatgaaaccatgttacggttcatatgcaaaacccacaaatgaaaatggagggcaaggcattcttgtaaagcaacaaaatggaaagctagaaagtcaagtggaaatgcaatttttctcaactactgaggcagccgcaggcaatggtgataacttgactcctaaagtggtattgtacagtgaagatgtagatatagaaaccccagacactcatatttcttacatgcccactattaaggaaggtaactcacgagaactaatgggccaacaatctatgcccaacaggcctaattacattgcttttagggacaattttattggtctaatgtattacaacagcacgggtaatatgggtgttctggcgggccaagcatcgcagttgaatgctgttgtagatttgcaagacagaaacacagagctttcataccagcttttgcttgattccattggtgatagaaccaggtacttttctatgtggaatcaggctgttgacagctatgatccagatgttagaattattgaaaatcatggaactgaagatgaacttccaaattactgctttccactgggaggtgtgattaatacagagactcttaccaaggtaaaacctaaaacaggtcaggaaaatggatgggaaaaagatgctacagaattttcagataaaaatgaaataagagttggaaataattttgccatggaaatcaatctaaatgccaacctgtggagaaatttcctgtactccaacatagcgctgtatttgcccgacaagctaaagtacagtccttccaacgtaaaaatttctgataacccaaacacctacgactacatgaacaagcgagtggtggctcccgggctagtggactgctacattaaccttggagcacgctggtcccttgactatatggacaacgtcaacccatttaaccaccaccgcaatgctggcctgcgctaccgctcaatgttgctgggcaatggtcgctatgtgcccttccacatccaggtgcctcagaagttctttgccattaaaaacctccttctcctgccgggctcatacacctacgagtggaacttcaggaaggatgttaacatggttctgcagagctccctaggaaatgacctaagggttgacggagccagcattaagtttgatagcatttgcctttacgccaccttcttccccatggcccacaacaccgcctccacgcttgaggccatgcttagaaacgacaccaacgaccagtcctttaacgactatctctccgccgccaacatgctctaccctatacccgccaacgctaccaacgtgcccatatccatcccctcccgcaactgggcggctttccgcggctgggccttcacgcgccttaagactaaggaaaccccatcactgggctcgggctacgacccttattacacctactctggctctataccctacctagatggaaccttttacctcaaccacacctttaagaaggtggccattacctttgactcttctgtcagctggcctggcaatgaccgcctgcttacccccaacgagtttgaaattaagcgctcagttgacggggagggttacaacgttgcccagtgtaacatgaccaaagactggttcctggtacaaatgctagctaactataacattggctaccagggcttctatatcccagagagctacaaggaccgcatgtactccttctttagaaacttccagcccatgagccgtcaggtggtggatgatactaaatacaaggactaccaacaggtgggcatcctacaccaacacaacaactctggatttgttggctaccttgcccccaccatgcgcgaaggacaggcctaccctgctaacttcccctatccgcttataggcaagaccgcagttgacagcattacccagaaaaagtttctttgcgatcgcaccctttggcgcatcccattctccagtaactttatgtccatgggcgcactcacagacctgggccaaaaccttctctacgccaactccgcccacgcgctagacatgacttttgaggtggatcccatggacgagcccacccttctttatgttttgtttgaagtctttgacgtggtccgtgtgcaccagccgcaccgcggcgtcatcgaaaccgtgtacctgcgcacgcccttctcggccggcaacgccacaacataaagaagcaagcaacatcaacaacagctgccgccatgggctccagtgagcaggaactgaaagccattgtcaaagatcttggttgtgggccatattttttgggcacctatgacaagcgctttccaggctttgtttctccacacaagctcgcctgcgccatagtcaatacggccggtcgcgagactgggggcgtacactggatggcctttgcctggaacccgcactcaaaaacatgctacctctttgagccctttggcttttctgaccagcgactcaagcaggtttaccagtttgagtacgagtcactcctgcgccgtagcgccattgcttcttcccccgaccgctgtataacgctggaaaagtccacccaaagcgtacaggggcccaactcggccgcctgtggactattctgctgcatgtttctccacgcctttgccaactggccccaaactcccatggatcacaaccccaccatgaaccttattaccggggtacccaactccatgctcaacagtccccaggtacagcccaccctgcgtcgcaaccaggaacagctctacagcttcctggagcgccactcgccctacttccgcagccacagtgcgcagattaggagcgccacttctttttgtcacttgaaaaacatgtaaaaataatgtactagagacactttcaataaaggcaaatgcttttatttgtacactctcgggtgattatttacccccacccttgccgtctgcgccgtttaaaaatcaaaggggttctgccgcgcatcgctatgcgccactggcagggacacgttgcgatactggtgtttagtgctccacttaaactcaggcacaaccatccgcggcagctcggtgaagttttcactccacaggctgcgcaccatcaccaacgcgtttagcaggtcgggcgccgatatcttgaagtcgcagttggggcctccgccctgcgcgcgcgagttgcgatacacagggttgcagcactggaacactatcagcgccgggtggtgcacgctggccagcacgctcttgtcggagatcagatccgcgtccaggtcctccgcgttgctcagggcgaacggagtcaactttggtagctgccttcccaaaaagggcgcgtgcccaggctttgagttgcactcgcaccgtagtggcatcaaaaggtgaccgtgcccggtctgggcgttaggatacagcgcctgcataaaagccttgatctgcttaaaagccacctgagcctttgcgccttcagagaagaacatgccgcaagacttgccggaaaactgattggccggacaggccgcgtcgtgcacgcagcaccttgcgtcggtgttggagatctgcaccacatttcggccccaccggttcttcacgatcttggccttgctagactgctccttcagcgcgcgctgcccgttttcgctcgtcacatccatttcaatcacgtgctccttatttatcataatgcttccgtgtagacacttaagctcgccttcgatctcagcgcagcggtgcagccacaacgcgcagcccgtgggctcgtgatgcttgtaggtcacctctgcaaacgactgcaggtacgcctgcaggaatcgccccatcatcgtcacaaaggtcttgttgctggtgaaggtcagctgcaacccgcggtgctcctcgttcagccaggtcttgcatacggccgccagagcttccacttggtcaggcagtagtttgaagttcgcctttagatcgttatccacgtggtacttgtccatcagcgcgcgcgcagcctccatgcccttctcccacgcagacacgatcggcacactcagcgggttcatcaccgtaatttcactttccgcttcgctgggctcttcctcttcctcttgcgtccgcataccacgcgccactgggtcgtcttcattcagccgccgcactgtgcgcttacctcctttgccatgcttgattagcaccggtgggttgctgaaacccaccatttgtagcgccacatcttctctttcttcctcgctgtccacgattacctctggtgatggcgggcgctcgggcttgggagaagggcgcttctttttcttcttgggcgcaatggccaaatccgccgccgaggtcgatggccgcgggctgggtgtgcgcggcaccagcgcgtcttgtgatgagtcttcctcgtcctcggactcgatacgccgcctcatccgcttttttgggggcgcccggggaggcggcggcgacggggacggggacgacacgtcctccatggttgggggacgtcgcgccgcaccgcgtccgcgctcgggggtggtttcgcgctgctcctcttcccgactggccatttccttctcctataggcagaaaaagatcatggagtcagtcgagaagaaggacagcctaaccgccccctctgagttcgccaccaccgcctccaccgatgccgccaacgcgcctaccaccttccccgtcgaggcacccccgcttgaggaggaggaagtgattatcgagcaggacccaggttttgtaagcgaagacgacgaggaccgctcagtaccaacagaggataaaaagcaagaccaggacaacgcagaggcaaacgaggaacaagtcgggcggggggacgaaaggcatggcgactacctagatgtgggagacgacgtgctgttgaagcatctgcagcgccagtgcgccattatctgcgacgcgttgcaagagcgcagcgatgtgcccctcgccatagcggatgtcagccttgcctacgaacgccacctattctcaccgcgcgtaccccccaaacgccaagaaaacggcacatgcgagcccaacccgcgcctcaacttctaccccgtatttgccgtgccagaggtgcttgccacctatcacatctttttccaaaactgcaagatacccctatcctgccgtgccaaccgcagccgagcggacaagcagctggccttgcggcagggcgctgtcatacctgatatcgcctcgctcaacgaagtgccaaaaatctttgagggtcttggacgcgacgagaagcgcgcggcaaacgctctgcaacaggaaaacagcgaaaatgaaagtcactctggagtgttggtggaactcgagggtgacaacgcgcgcctagccgtactaaaacgcagcatcgaggtcacccactttgcctacccggcacttaacctaccccccaaggtcatgagcacagtcatgagtgagctgatcgtgcgccgtgcgcagcccctggagagggatgcaaatttgcaagaacaaacagaggagggcctacccgcagttggcgacgagcagctagcgcgctggcttcaaacgcgcgagcctgccgacttggaggagcgacgcaaactaatgatggccgcagtgctcgttaccgtggagcttgagtgcatgcagcggttctttgctgacccggagatgcagcgcaagctagaggaaacattgcactacacctttcgacagggctacgtacgccaggcctgcaagatctccaacgtggagctctgcaacctggtctcctaccttggaattttgcacgaaaaccgccttgggcaaaacgtgcttcattccacgctcaagggcgaggcgcgccgcgactacgtccgcgactgcgtttacttatttctatgctacacctggcagacggccatgggcgtttggcagcagtgcttggaggagtgcaacctcaaggagctgcagaaactgctaaagcaaaacttgaaggacctatggacggccttcaacgagcgctccgtggccgcgcacctggcggacatcattttccccgaacgcctgcttaaaaccctgcaacagggtctgccagacttcaccagtcaaagcatgttgcagaactttaggaactttatcctagagcgctcaggaatcttgcccgccacctgctgtgcacttcctagcgactttgtgcccattaagtaccgcgaatgccctccgccgctttggggccactgctaccttctgcagctagccaactaccttgcctaccactctgacataatggaagacgtgagcggtgacggtctactggagtgtcactgtcgctgcaacctatgcaccccgcaccgctccctggtttgcaattcgcagctgcttaacgaaagtcaaattatcggtacctttgagctgcagggtccctcgcctgacgaaaagtccgcggctccggggttgaaactcactccggggctgtggacgtcggcttaccttcgcaaatttgtacctgaggactaccacgcccacgagattaggttctacgaagaccaatcccgcccgcctaatgcggagcttaccgcctgcgtcattacccagggccacattcttggccaattgcaagccatcaacaaagcccgccaagagtttctgctacgaaagggacggggggtttacttggacccccagtccggcgaggagctcaacccaatccccccgccgccgcagccctatcagcagcagccgcgggcccttgcttcccaggatggcacccaaaaagaagctgcagctgccgccgccacccacggacgaggaggaatactgggacagtcaggcagaggaggttttggacgaggaggaggaggacatgatggaagactgggagagcctagacgaggaagcttccgaggtcgaagaggtgtcagacgaaacaccgtcaccctcggtcgcattcccctcgccggcgccccagaaatcggcaaccggttccagcatggctacaacctccgctcctcaggcgccgccggcactgcccgttcgccgacccaaccgtagatgggacaccactggaaccagggccggtaagtccaagcagccgccgccgttagcccaagagcaacaacagcgccaaggctaccgctcatggcgcgggcacaagaacgccatagttgcttgcttgcaagactgtgggggcaacatctccttcgcccgccgctttcttctctaccatcacggcgtggccttcccccgtaacatcctgcattactaccgtcatctctacagcccatactgcaccggcggcagcggcagcaacagcagcggccacacagaagcaaaggcgaccggatagcaagactctgacaaagcccaagaaatccacagcggcggcagcagcaggaggaggagcgctgcgtctggcgcccaacgaacccgtatcgacccgcgagcttagaaacaggatttttcccactctgtatgctatatttcaacagagcaggggccaagaacaagagctgaaaataaaaaacaggtctctgcgatccctcacccgcagctgcctgtatcacaaaagcgaagatcagcttcggcgcacgctggaagacgcggaggctctcttcagtaaatactgcgcgctgactcttaaggactagtttcgcgccctttctcaaatttaagcgcgaaaactacgtcatctccagcggccacacccggcgccagcacctgttgtcagcgccattatgagcaaggaaattcccacgccctacatgtggagttaccagccacaaatgggacttgcggctggagctgcccaagactactcaacccgaataaactacatgagcgcgggaccccacatgatatcccgggtcaacggaatacgcgcccaccgaaaccgaattctcctggaacaggcggctattaccaccacacctcgtaataaccttaatccccgtagttggcccgctgccctggtgtaccaggaaagtcccgctcccaccactgtggtacttcccagagacgcccaggccgaagttcagatgactaactcaggggcgcagcttgcgggcggctttcgtcacagggtgcggtcgcccgggcagggtataactcacctgacaatcagagggcgaggtattcagctcaacgacgagtcggtgagctcctcgcttggtctccgtccggacgggacatttcagatcggcggcgccggccgctcttcattcacgcctcgtcaggcaatcctaactctgcagacctcgtcctctgagccgcgctctggaggcattggaactctgcaatttattgaggagtttgtgccatcggtctactttaaccccttctcgggacctcccggccactatccggatcaatttattcctaactttgacgcggtaaaggactcggcggacggctacgactgaatgttaagtggagaggcagagcaactgcgcctgaaacacctggtccactgtcgccgccacaagtgctttgcccgcgactccggtgagttttgctactttgaattgcccgaggatcatatcgagggcccggcgcacggcgtccggcttaccgcccagggagagcttgcccgtagcctgattcgggagtttacccagcgccccctgctagttgagcgggacaggggaccctgtgttctcactgtgatttgcaactgtcctaaccctggattacatcaagatcctctagttaatgtcaggtcgcctaagtcgattaactagagtacccggggatcttattccctttaactaataaaaaaaaataataaagcatcacttacttaaaatcagttagcaaatttctgtccagtttattcagcagcacctccttgccctcctcccagctctggtattgcagcttcctcctggctgcaaactttctccacaatctaaatggaatgtcagtttcctcctgttcctgtccatccgcacccactatcttcatgttgttgcagatgaagcgcgcaagaccgtctgaagataccttcaaccccgtgtatccatatgacacggaaaccggtcctccaactgtgccttttcttactcctccctttgtatcccccaatgggtttcaagagagtccccctggggtactctctttgcgcctatccgaacctctagttacctccaatggcatgcttgcgctcaaaatgggcaacggcctctctctggacgaggccggcaaccttacctcccaaaatgtaaccactgtgagcccacctctcaaaaaaaccaagtcaaacataaacctggaaatatctgcacccctcacagttacctcagaagccctaactgtggctgccgccgcacctctaatggtcgcgggcaacacactcaccatgcaatcacaggccccgctaaccgtgcacgactccaaacttagcattgccacccaaggacccctcacagtgtcagaaggaaagctagccctgcaaacatcaggccccctcaccaccaccgatagcagtacccttactatcactgcctcaccccctctaactactgccactggtagcttgggcattgacttgaaagagcccatttatacacaaaatggaaaactaggactaaagtacggggctcctttgcatgtaacagacgacctaaacactttgaccgtagcaactggtccaggtgtgactattaataatacttccttgcaaactaaagttactggagccttgggttttgattcacaaggcaatatgcaacttaatgtagcaggaggactaaggattgattctcaaaacagacgccttatacttgatgttagttatccgtttgatgctcaaaaccaactaaatctaagactaggacagggccctctttttataaactcagcccacaacttggatattaactacaacaaaggcctttacttgtttacagcttcaaacaattccaaaaagcttgaggttaacctaagcactgccaaggggttgatgtttgacgctacagccatagccattaatgcaggagatgggcttgaatttggttcacctaatgcaccaaacacaaatcccctcaaaacaaaaattggccatggcctagaatttgattcaaacaaggctatggttcctaaactaggaactggccttagttttgacagcacaggtgccattacagtaggaaacaaaaataatgataagctaactttgtggaccggaataaaccctccacctaactgtcaaattgtggaaaacactaatacaaatgatggcaaacttactttagtattagtaaaaaatggagggcttgttaatggctacgtgtctctagttggtgtatcagacactgtgaaccaaatgttcacacaaaagacagcaaacatccaattaagattatattttgactcttctggaaatctattaactgaggaatcagacttaaaaattccacttaaaaataaatcttctacagcgaccagtgaaactgtagccagcagcaaagcctttatgccaagtactacagcttatcccttcaacaccactactagggatagtgaaaactacattcatggaatatgttactacatgactagttatgatagaagtctatttcccttgaacatttctataatgctaaacagccgtatgatttcttccaatgttgcctatgccatacaatttgaatggaatctaaatgcaagtgaatctccagaaagcaacatagctacgctgaccacatccccctttttcttttcttacattacagaagacgacaactaaagaatcgtttgtgttatgtttcaacgtgtttatttttcaattgcagaaaatttcaagtcatttttcattcagtagtatagccccaccaccacatagcttatacagatcaccgtaccttaatcaaactcacagaaccctagtattcaacctgccacctccctcccaacacacagagtacacagtcctttctccccggctggccttaaaaagcatcatatcatgggtaacagacatattcttaggtgttatattccacacggtttcctgtcgagccaaacgctcatcagtgatattaataaactccccgggcagctcacttaagttcatgtcgctgtccagctgctgagccacaggctgctgtccaacttgcggttgcttaacgggcggcgaaggagaagtccacgcctacatgggggtagagtcataatcgtgcatcaggatagggcggtggtgctgcagcagcgcgcgaataaactgctgccgccgccgctccgtcctgcaggaatacaacatggcagtggtctcctcagcgatgattcgcaccgcccgcagcataaggcgccttgtcctccgggcacagcagcgcaccctgatctcacttaaatcagcacagtaactgcagcacagcaccacaatattgttcaaaatcccacagtgcaaggcgctgtatccaaagctcatggcggggaccacagaacccacgtggccatcataccacaagcgcaggtagattaagtggcgacccctcataaacacgctggacataaacattacctcttttggcatgttgtaattcaccacctcccctctgattaaacatggcgccatccaccaccatcctaaaccagctggccaaaacctgcccgccggctatacactgcagggaaccgggactggaacaatgacagtggagagcccaggactcgtaaccatggatcatcatgctcgtcatgatatcaatgttggcacaacacaggcacacgtgcatacacttcctcaggattacaagctcctcccgcgttagaaccatatcccagggaacaacccattcctgaatcagcgtaaatcccacactgcagggaagacctcgcacgtaactcacgttgtgcattgtcaaagtgttacattcgggcagcagcggatgatcctccagtatggtagcgcgggtttctgtctcaaaaggaggtagacgatccctactgtacggagtgcgccgagacaaccgagatcgtgttggtcgtagtgtcatgccaaatggaacgccggacgtagtcatatttcctgaagcaaaaccaggtgcgggcgtgacaaacagatctgcgtctccggtctcgccgcttagatcgctctgtgtagtagttgtagtatatccactctctcaaagcatccaggcgccccctggcttcgggttctatgtaaactccttcatgcgccgctgccctgataacatccaccaccgcagaataagccacacccagccaacctacacattcgttctgcgagtcacacacgggaggagcgggaagagctggaagaaccatgtttttttttttattccaaaagattatccaaaacctcaaaatgaagatctattaagtgaacgcgctcccctccggtggcgtggtcaaactctacagccaaagaacagataatggcatttgtaagatgttgcacaatggcttccaaaaggcaaacggccctcacgtccaagtggacgtaaaggctaaacccttcagggtgaatctcctctataaacattccagcaccttcaaccatgcccaaataattctcatctcgccaccttctcaatatatctctaagcaaatcccgaatattaagtccggccattgtaaaaatctgctccagagcgccctccaccttcagcctcaagcagcgaatcatgattgcaaaaattcaggttcctcacagacctgtataagattcaaaagcggaacattaacaaaaataccgcgatcccgtaggtcccttcgcagggccagctgaacataatcgtgcaggtctgcacggaccagcgcggccacttccccgccaggaaccatgacaaaagaacccacactgattatgacacgcatactcggagctatgctaaccagcgtagccccgatgtaagcttgttgcatgggcggcgatataaaatgcaaggtgctgctcaaaaaatcaggcaaagcctcgcgcaaaaaagaaagcacatcgtagtcatgctcatgcagataaaggcaggtaagctccggaaccaccacagaaaaagacaccatttttctctcaaacatgtctgcgggtttctgcataaacacaaaataaaataacaaaaaaacatttaaacattagaagcctgtcttacaacaggaaaaacaacccttataagcataagacggactacggccatgccggcgtgaccgtaaaaaaactggtcaccgtgattaaaaagcaccaccgacagctcctcggtcatgtccggagtcataatgtaagactcggtaaacacatcaggttgattcacatcggtcagtgctaaaaagcgaccgaaatagcccgggggaatacatacccgcaggcgtagagacaacattacagcccccataggaggtataacaaaattaataggagagaaaaacacataaacacctgaaaaaccctcctgcctaggcaaaatagcaccctcccgctccagaacaacatacagcgcttccacagcggcagccataacagtcagccttaccagtaaaaaagaaaacctattaaaaaaacaccactcgacacggcaccagctcaatcagtcacagtgtaaaaaagggccaagtgcagagcgagtatatataggactaaaaaatgacgtaacggttaaagtccacaaaaaacacccagaaaaccgcacgcgaacctacgcccagaaacgaaagccaaaaaacccacaacttcctcaaatcgtcacttccgttttcccacgttacgtcacttcccattttaagaaaactacaattcccaacacatacaagttactccgccctaaaacctacgtcacccgccccgttcccacgccccgcgccacgtcacaaactccaccccctcattatcatattggcttcaatccaaaataaggtatattattgatgatg

SEQ ID NO: 41 - DNA, 36153 bp, Artificial Sequence
  Adk35RF-Spike/E4orf6(RSV)-E4dl-12(E4re#39)
ttaattaacatcatcaataatataccttattttggattgaagccaatatgataatgagggggtggagtttgtgacgtggcgcggggcgtgggaacggggcgggtgacgtagtagtgtggcggaagtgtgatgttgcaagtgtggcggaacacatgtaagcgacggatgtggcaaaagtgacgtttttggtgtgcgccggtgtacacaggaagtgacaattttcgcgcggttttaggcggatgttgtagtaaatttgggcgtaaccgagtaagatttggccattttcgcgggaaaactgaataagaggaagtgaaatctgaataattttgtgttactcatagcgcgtaataatttgatccgcgttaagatacattgatgagtttggacaaaccacaactagaatgcagtgaaaaaaatgctttatttgtgaaatttgtgatgctattgctttatttgtaaccattataagctgcaataaacaagttaacaacaacaattgcattcattttatgtttcaggttcagggggaggtgtgggaggttttttaaagcaagtaaaacctctacaaatgtggtatggctgattatgatcaattttcatggccacttgatgtattgttcatatttgcccagttcttggaggtcaatcagggactcattcaggttcttagccacctcattcagtctgtcaatctccttctggatgttcaccacagaggcattgatgccagagatgtctcccaggtccacatcagggctggtgtggttcttgaagtatttgtccagttcctccttgaaggagtccagttcaggttggagtgggtcatagactgtgttgttcacaatgccaatcaccacatcacagttgccagacacaaaggtgttgtctgtggtgataatctgtggttcatagaagttcctctgggtcacaaaccagtgggtgccattgctcacaaacactccctcccttggaaagtgagccttgccatcatggcagatggcaggggctgtggtgaagttcttctcctgggcaggcacataggtcacatgcaggaacaccactccatgaggggcagactgtggaaaactcatcaggtggtagcccttgccacagaagtccaccctcttgctttgtcccagcacacactcactcatcttggtggcagccaggttggcagatgccctaatctcagcagccctgataagttgttgggtcacataggtttggagggattggagtctgcctgtaatcagtctgtcaatctggacctcagcctccaccttgtccagtctgctcaggatgtcattcagcacagaggagatggctccaaagttgctggaaagttgcttcaccagggtgttcagagcctgggcattctggttcaccacatcttggagtttgcccagggcagaggctgtgctggacagggagtcctgaatcttgccaatggcagagttgaactggttggcaatcagtttctggttctcatagagcacattctgggtcactccaatgccattgaacctgtaagccatctgcatagcaaatgggatttggagggctgctcctgctccaaaggtccagccagaggtgatggtgccagccagcagggcagaggtgtattgggcaatcatctcatctgtcagcagtggaggcagcactgtcagtccattgaacttctgggcacaaatcaggtccctggcagcaatgtctcccagacagtctccatattgcttgatgaagccagcatcagccagggtcaccttgttgaacagcaggtcctcaatgaaggacctcttgcttggcttgcttgggtcaggcagaatctggctgaagttgaagcctccaaagtccttgattggaggtgtcttgtaaatctgcttcacctgggcaaacacctcctgggtgttcttgtcctgttccacagcaatgcctgtcagagccctgttaagttgggtacagaaggagccatattggagcagcaggttgctacactctgtgctgtctccacagatatacattgtacagtccacagaggtcttggtcatactcacaggcagaatctctgtggtcacagagatggtgaagttggttgggatggcaatgctgttgttgctgtaagccacagagttctctgctcccagactcattgtgtaggcaatgatgctctggcttgccacagacctcgacccaccgccaccggtctgggtctggtaggaggcacagatgcctgctccaattgggatgtcacactcataggagttgttcacatgctctgctccaatcagacagccagccctggtctggaacacattgctgcctgtgctgtagaccctccaggttggtgtaagttggtcagcatggatagccacaggcacctcagtacagttcacatcctggtagagcacagccacctggttgctggtgttggtgccaggtgtaatcacagacactcctccaaaggaacatggtgtgatgtccagaatctccaaggtctgtgggtccctcacagcatctgtggtgtcagcaatgtccctgccaaactgttggaatggcaggaacttcttgttgctctctgtcagcactcctgtgcctgtcagtccattgaagttgaagttcacacacttgttcttcaccaggttggtgctcttctttggtccacacactgtggcaggggcatggagcagttcaaaggacagcaccaccaccctgtatggttggtagcccactccattggttggttggaagccataggattggagtggaaagtaacagttgaagccctccactccattacatggtgtgctgccagcctggtaaatctctgtgctgatgtccctctcaaatggtttcaggttgctcttcctgaacagtctgtagaggtagttgtagttgcctcccaccttgctgtccaggttgttgctgttccaggcaatcacacagcctgtgaagtcatcaggcagtttgtagttgtagtcagcaatcttgcctgtttgtccaggggcaatctgtctcacctcatctcccctaatcacaaaggagtcagcatagacattggtgaaacacaggtcattcagtttggttgggctcactccataacacttgaaggtgctgaaggaggcagagttgtagagcacagagtagtcagccacacagttgctaatcctcttcctgttccaggcatagacagaggcaaacctggtggcattgaacacctctccaaatggacacaggttggtgatgtttggaaacctcacaatgctctctgttggttggaccctgaagttgctggtctggtagatgcccttctccactgtgaaggatttcagggtacacttggtctcagacagtgggtccagggcacagtccacagcatctgtgatggtgccattctcattgtatttcagcaggaaggtccttggttggaggtagcccacatagtaggctgctgctcctgctgtccagccagaggaggagtctccaggtgtcaggtaggacctgtgcagagccagcagggtctggaacctggtgatgttgatgccaattggcaggtccaccagtggttccaaggcagagaagccctgtggcaggtccctcaccaggttgattggtgtgtgtttgctgtaaatcttgaagtagccatcaatgttcttgaacacaaactccctcaggttcttgaagttgccctgcttgccctccaagtccatcaggaatggttggctcacatattcaaaggtacagttgttggcagaggagtagaccctgaactcagactccatccaggacttgttgttcttgtggtagtagactcccaggaatgggtcattacagaactggaactcacacaccttaatcaccacattggtggcattgttcacaatcagcagggactgggtcttgctgtccagggtggtgccaaaaatccagcccctgatgatgttgctcttctctgtgctggcaaagtagactccatcattgaatggcagcacagggttgtcaaacctcttggtgccattggtgccagacacatggatggcatggaaccaggtcacattgctgaagaatggcaggaacaggtcctgggtgctgtgcagcacagaggacctgaacaccttgtcagggtagtagactcccctggtgaaggagttggtgtaggcaggaggaagttgggtcctggtggtcaggttcacacactggctggacaccagtggcagcagcaccaggaacacaaacatggtggcaaatcggaggctggatcggtcccggtgtcttctatggaggtcaaaacagcgtggatggcgtctccaggcgatctgacggttcactaaacgagctcgtcgacgatctctatcactgatagggagatctctatcactgatagggagagctctgcttatatagacctcccaccgtacacgcctaccgcccatttgcgtcaatggggcggagttgttacgacattttggaaagtcccgttgattttggtgccaaaacaaactcccattgacgtcaatggggtggagacttggaaatccccgtgagtcaaaccgctatccacgcccattgatgtactgccaaaaccgcatcaccatggtaatagcgatgactaatacgtagatgtactgccaagtaggaaagtcccataaggtcatgtactgggcataatgccaggcgggccatttaccgtcattgacgtcaatagggggcgtacttggcatatgatacacttgatgtactgccaagtgggcagtttaccgtaaatactccacccattgacgtcaatggaaagtccctattggcgttactatgggaacatacgtcattattgacgtcaatgggcgggggtcgttgggcggtcagccaggcgggccatttaccgtaagttatgtaacgcggaactccatatatgggctatgaactaatgaccccgtaattgattactattacagtgtagtcttatgcaatactcttgtagtcttgcaacatggtaacgatgagttagcaacatgccttacaaggagagaaaaagcaccgtgcatgccgattggtggaagtaaggtggtacgatcgtgccttattaggaaggcaacagacgggtctgacatggattggacgaaccactgaattgccgcattgcagagatattgtatttaagtgcctagctcgatacataaacaaactaccccaagctggccaccatgactacgtccggcgttccatttggcatgacactacgaccaacacgatctcggttgtctcggcgcactccgtacagtagggatcgtctacctccttttgagacagaaacccgcgctaccatactggaggatcatccgctgctgcccgaatgtaacactttgacaatgcacaacgtgagttacgtgcgaggtcttccctgcagtgtgggatttacgctgattcaggaatgggttgttccctgggatatggttctaacgcgggaggagcttgtaatcctgaggaagtgtatgcacgtgtgcctgtgttgtgccaacattgatatcatgacgagcatgatgatccatggttacgagtcctgggctctccactgtcattgttccagtcccggttccctgcagtgtatagccggcgggcaggttttggccagctggtttaggatggtggtggatggcgccatgtttaatcagaggtttatatggtaccgggaggtggtgaattacaacatgccaaaagaggtaatgtttatgtccagcgtgtttatgaggggtcgccacttaatctacctgcgcttgtggtatgatggccacgtgggttctgtggtccccgccatgagctttggatacagcgccttgcactgtgggattttgaacaatattgtggtgctgtgctgcagttactgtgctgatttaagtgagatcagggtgcgctgctgtgcccggaggacaaggcgccttatgctgcgggcggtgcgaatcatcgctgaggagaccactgccatgttgtattcctgcaggacggagcggcggcggcagcagtttattcgcgcgctgctgcagcaccaccgccctatcctgatgcacgattatgactctacccccatgtagaagcttggggatcaattctctagagctcgctgatcagcctcgactgtgccttctagttgccagccatctgttgtttgcccctcccccgtgccttccttgaccctggaaggtgccactcccactgtcctttcctaataaaatgaggaaattgcatcgcattgtctgagtaggtgtcattctattctggggggtggggtggggcaggacagcaagggggaggattgggaagacaatagcaggcatgctggggatgcggtgggctctatggcttctgaggcaaattgggcgtggcttaagggtgggaaagaatatataaggtgggggtcttatgtagttttgtatctgttttgcagcagccgccgccgccatgagcaccaactcgtttgatggaagcattgtgagctcatatttgacaacgcgcatgcccccatgggccggggtgcgtcagaatgtgatgggctccagcattgatggtcgccccgtcctgcccgcaaactctactaccttgacctacgagaccgtgtctggaacgccgttggagactgcagcctccgccgccgcttcagccgctgcagccaccgcccgcgggattgtgactgactttgctttcctgagcccgcttgcaagcagtgcagcttcccgttcatccgcccgcgatgacaagttgacggctcttttggcacaattggattctttgacccgggaacttaatgtcgtttctcagcagctgttggatctgcgccagcaggtttctgccctgaaggcttcctcccctcccaatgcggtttaaaacataaataaaaaaccagactctgtttggatttggatcaagcaagtgtcttgctgtctttatttaggggttttgcgcgcgcggtaggcccgggaccagcggtctcggtcgttgagggtcctgtgtattttttccaggacgtggtaaaggtgactctggatgttcagatacatgggcataagcccgtctctggggtggaggtagcaccactgcagagcttcatgctgcggggtggtgttgtagatgatccagtcgtagcaggagcgctgggcgtggtgcctaaaaatgtctttcagtagcaagctgattgccaggggcaggcccttggtgtaagtgtttacaaagcggttaagctgggatgggtgcatacgtggggatatgagatgcatcttggactgtatttttaggttggctatgttcccagccatatccctccggggattcatgttgtgcagaaccaccagcacagtgtatccggtgcacttgggaaatttgtcatgtagcttagaaggaaatgcgtggaagaacttggagacgcccttgtgacctccaagattttccatgcattcgtccataatgatggcaatgggcccacgggcggcggcctgggcgaagatatttctgggatcactaacgtcatagttgtgttccaggatgagatcgtcataggccatttttacaaagcgcgggcggagggtgccagactgcggtataatggttccatccggcccaggggcgtagttaccctcacagatttgcatttcccacgctttgagttcagatggggggatcatgtctacctgcggggcgatgaagaaaacggtttccggggtaggggagatcagctgggaagaaagcaggttcctgagcagctgcgacttaccgcagccggtgggcccgtaaatcacacctattaccggctgcaactggtagttaagagagctgcagctgccgtcatccctgagcaggggggccacttcgttaagcatgtccctgactcgcatgttttccctgaccaaatccgccagaaggcgctcgccgcccagcgatagcagttcttgcaaggaagcaaagtttttcaacggtttgagaccgtccgccgtaggcatgcttttgagcgtttgaccaagcagttccaggcggtcccacagctcggtcacctgctctacggcatctcgatccagcatatctcctcgtttcgcgggttggggcggctttcgctgtacggcagtagtcggtgctcgtccagacgggccagggtcatgtctttccacgggcgcagggtcctcgtcagcgtagtctgggtcacggtgaaggggtgcgctccgggctgcgcgctggccagggtgcgcttgaggctggtcctgctggtgctgaagcgctgccggtcttcgccctgcgcgtcggccaggtagcatttgaccatggtgtcatagtccagcccctccgcggcgtggcccttggcgcgcagcttgcccttggaggaggcgccgcacgaggggcagtgcagacttttgagggcgtagagcttgggcgcgagaaataccgattccggggagtaggcatccgcgccgcaggccccgcagacggtctcgcattccacgagccaggtgagctctggccgttcggggtcaaaaaccaggtttcccccatgctttttgatgcgtttcttacctctggtttccatgagccggtgtccacgctcggtgacgaaaaggctgtccgtgtccccgtatacagacttgagaggcctgtcctcgagcggtgttccgcggtcctcctcgtatagaaactcggaccactctgagacaaaggctcgcgtccaggccagcacgaaggaggctaagtgggaggggtagcggtcgttgtccactagggggtccactcgctccagggtgtgaagacacatgtcgccctcttcggcatcaaggaaggtgattggtttgtaggtgtaggccacgtgaccgggtgttcctgaaggggggctataaaagggggtgggggcgcgttcgtcctcactctcttccgcatcgctgtctgcgagggccagctgttggggtgagtactccctctgaaaagcgggcatgacttctgcgctaagattgtcagtttccaaaaacgaggaggatttgatattcacctggcccgcggtgatgcctttgagggtggccgcatccatctggtcagaaaagacaatctttttgttgtcaagcttggtggcaaacgacccgtagagggcgttggacagcaacttggcgatggagcgcagggtttggtttttgtcgcgatcggcgcgctccttggccgcgatgtttagctgcacgtattcgcgcgcaacgcaccgccattcgggaaagacggtggtgcgctcgtcgggcaccaggtgcacgcgccaaccgcggttgtgcagggtgacaaggtcaacgctggtggctacctctccgcgtaggcgctcgttggtccagcagaggcggccgcccttgcgcgagcagaatggcggtagggggtctagctgcgtctcgtccggggggtctgcgtccacggtaaagaccccgggcagcaggcgcgcgtcgaagtagtctatcttgcatccttgcaagtctagcgcctgctgccatgcgcgggcggcaagcgcgcgctcgtatgggttgagtgggggaccccatggcatggggtgggtgagcgcggaggcgtacatgccgcaaatgtcgtaaacgtagaggggctctctgagtattccaagatatgtagggtagcatcttccaccgcggatgctggcgcgcacgtaatcgtatagttcgtgcgagggagcgaggaggtcgggaccgaggttgctacgggcgggctgctctgctcggaagactatctgcctgaagatggcatgtgagttggatgatatggttggacgctggaagacgttgaagctggcgtctgtgagacctaccgcgtcacgcacgaaggaggcgtaggagtcgcgcagcttgttgaccagctcggcggtgacctgcacgtctagggcgcagtagtccagggtttccttgatgatgtcatacttatcctgtcccttttttttccacagctcgcggttgaggacaaactcttcgcggtctttccagtactcttggatcggaaacccgtcggcctccgaacggtaagagcctagcatgtagaactggttgacggcctggtaggcgcagcatcccttttctacgggtagcgcgtatgcctgcgcggccttccggagcgaggtgtgggtgagcgcaaaggtgtccctgaccatgactttgaggtactggtatttgaagtcagtgtcgtcgcatccgccctgctcccagagcaaaaagtccgtgcgctttttggaacgcggatttggcagggcgaaggtgacatcgttgaagagtatctttcccgcgcgaggcataaagttgcgtgtgatgcggaagggtcccggcacctcggaacggttgttaattacctgggcggcgagcacgatctcgtcaaagccgttgatgttgtggcccacaatgtaaagttccaagaagcgcgggatgcccttgatggaaggcaattttttaagttcctcgtaggtgagctcttcaggggagctgagcccgtgctctgaaagggcccagtctgcaagatgagggttggaagcgacgaatgagctccacaggtcacgggccattagcatttgcaggtggtcgcgaaaggtcctaaactggcgacctatggccattttttctggggtgatgcagtagaaggtaagcgggtcttgttcccagcggtcccatccaaggttcgcggctaggtctcgcgcggcagtcactagaggctcatctccgccgaacttcatgaccagcatgaagggcacgagctgcttcccaaaggcccccatccaagtataggtctctacatcgtaggtgacaaagagacgctcggtgcgaggatgcgagccgatcgggaagaactggatctcccgccaccaattggaggagtggctattgatgtggtgaaagtagaagtccctgcgacgggccgaacactcgtgctggcttttgtaaaaacgtgcgcagtactggcagcggtgcacgggctgtacatcctgcacgaggttgacctgacgaccgcgcacaaggaagcagagtgggaatttgagcccctcgcctggcgggtttggctggtggtcttctacttcggctgcttgtccttgaccgtctggctgctcgaggggagttacggtggatcggaccaccacgccgcgcgagcccaaagtccagatgtccgcgcgcggcggtcggagcttgatgacaacatcgcgcagatgggagctgtccatggtctggagctcccgcggcgtcaggtcaggcgggagctcctgcaggtttacctcgcatagacgggtcagggcgcgggctagatccaggtgatacctaatttccaggggctggttggtggcggcgtcgatggcttgcaagaggccgcatccccgcggcgcgactacggtaccgcgcggcgggcggtgggccgcgggggtgtccttggatgatgcatctaaaagcggtgacgcgggcgagcccccggaggtagggggggctccggacccgccgggagagggggcaggggcacgtcggcgccgcgcgcgggcaggagctggtgctgcgcgcgtaggttgctggcgaacgcgacgacgcggcggttgatctcctgaatctggcgcctctgcgtgaagacgacgggcccggtgagcttgaacctgaaagagagttcgacagaatcaatttcggtgtcgttgacggcggcctggcgcaaaatctcctgcacgtctcctgagttgtcttgataggcgatctcggccatgaactgctcgatctcttcctcctggagatctccgcgtccggctcgctccacggtggcggcgaggtcgttggaaatgcgggccatgagctgcgagaaggcgttgaggcctccctcgttccagacgcggctgtagaccacgcccccttcggcatcgcgggcgcgcatgaccacctgcgcgagattgagctccacgtgccgggcgaagacggcgtagtttcgcaggcgctgaaagaggtagttgagggtggtggcggtgtgttctgccacgaagaagtacataacccagcgtcgcaacgtggattcgttgatatcccccaaggcctcaaggcgctccatggcctcgtagaagtccacggcgaagttgaaaaactgggagttgcgcgccgacacggttaactcctcctccagaagacggatgagctcggcgacagtgtcgcgcacctcgcgctcaaaggctacaggggcctcttcttcttcttcaatctcctcttccataagggcctccccttcttcttcttctggcggcggtgggggaggggggacacggcggcgacgacggcgcaccgggaggcggtcgacaaagcgctcgatcatctccccgcggcgacggcgcatggtctcggtgacggcgcggccgttctcgcgggggcgcagttggaagacgccgcccgtcatgtcccggttatgggttggcggggggctgccatgcggcagggatacggcgctaacgatgcatctcaacaattgttgtgtaggtactccgccgccgagggacctgagcgagtccgcatcgaccggatcggaaaacctctcgagaaaggcgtctaaccagtcacagtcgcaaggtaggctgagcaccgtggcgggcggcagcgggcggcggtcggggttgtttctggcggaggtgctgctgatgatgtaattaaagtaggcggtcttgagacggcggatggtcgacagaagcaccatgtccttgggtccggcctgctgaatgcgcaggcggtcggccatgccccaggcttcgttttgacatcggcgcaggtctttgtagtagtcttgcatgagcctttctaccggcacttcttcttctccttcctcttgtcctgcatctcttgcatctatcgctgcggcggcggcggagtttggccgtaggtggcgccctcttcctcccatgcgtgtgaccccgaagcccctcatcggctgaagcagggctaggtcggcgacaacgcgctcggctaatatggcctgctgcacctgcgtgagggtagactggaagtcatccatgtccacaaagcggtggtatgcgcccgtgttgatggtgtaagtgcagttggccataacggaccagttaacggtctggtgacccggctgcgagagctcggtgtacctgagacgcgagtaagccctcgagtcaaatacgtagtcgttgcaagtccgcaccaggtactggtatcccaccaaaaagtgcggcggcggctggcggtagaggggccagcgtagggtggccggggctccgggggcgagatcttccaacataaggcgatgatatccgtagatgtacctggacatccaggtgatgccggcggcggtggtggaggcgcgcggaaagtcgcggacgcggttccagatgttgcgcagcggcaaaaagtgctccatggtcgggacgctctggccggtcaggcgcgcgcaatcgttgacgctctagcgtgcaaaaggagagcctgtaagcgggcactcttccgtggtctggtggataaattcgcaagggtatcatggcggacgaccggggttcgagccccgtatccggccgtccgccgtgatccatgcggttaccgcccgcgtgtcgaacccaggtgtgcgacgtcagacaacgggggagtgctccttttggcttccttccaggcgcggcggctgctgcgctagcttttttggccactggccgcgcgcagcgtaagcggttaggctggaaagcgaaagcattaagtggctcgctccctgtagccggagggttattttccaagggttgagtcgcgggacccccggttcgagtctcggaccggccggactgcggcgaacgggggtttgcctccccgtcatgcaagaccccgcttgcaaattcctccggaaacagggacgagccccttttttgcttttcccagatgcatccggtgctgcggcagatgcgcccccctcctcagcagcggcaagagcaagagcagcggcagacatgcagggcaccctcccctcctcctaccgcgtcaggaggggcgacatccgcggttgacgcggcagcagatggtgattacgaacccccgcggcgccgggcccggcactacctggacttggaggagggcgagggcctggcgcggctaggagcgccctctcctgagcggcacccaagggtgcagctgaagcgtgatacgcgtgaggcgtacgtgccgcggcagaacctgtttcgcgaccgcgagggagaggagcccgaggagatgcgggatcgaaagttccacgcagggcgcgagctgcggcatggcctgaatcgcgagcggttgctgcgcgaggaggactttgagcccgacgcgcgaaccgggattagtcccgcgcgcgcacacgtggcggccgccgacctggtaaccgcatacgagcagacggtgaaccaggagattaactttcaaaaaagctttaacaaccacgtgcgtacgcttgtggcgcgcgaggaggtggctataggactgatgcatctgtgggactttgtaagcgcgctggagcaaaacccaaatagcaagccgctcatggcgcagctgttccttatagtgcagcacagcagggacaacgaggcattcagggatgcgctgctaaacatagtagagcccgagggccgctggctgctcgatttgataaacatcctgcagagcatagtggtgcaggagcgcagcttgagcctggctgacaaggtggccgccatcaactattccatgcttagcctgggcaagttttacgcccgcaagatataccataccccttacgttcccatagacaaggaggtaaagatcgaggggttctacatgcgcatggcgctgaaggtgcttaccttgagcgacgacctgggcgtttatcgcaacgagcgcatccacaaggccgtgagcgtgagccggcggcgcgagctcagcgaccgcgagctgatgcacagcctgcaaagggccctggctggcacgggcagcggcgatagagaggccgagtcctactttgacgcgggcgctgacctgcgctgggccccaagccgacgcgccctggaggcagctggggccggacctgggctggcggtggcacccgcgcgcgctggcaacgtcggcggcgtggaggaatatgacgaggacgatgagtacgagccagaggacggcgagtactaagcggtgatgtttctgatcagatgatgcaagacgcaacggacccggcggtgcgggcggcgctgcagagccagccgtccggccttaactccacggacgactggcgccaggtcatggaccgcatcatgtcgctgactgcgcgcaatcctgacgcgttccggcagcagccgcaggccaaccggctctccgcaattctggaagcggtggtcccggcgcgcgcaaaccccacgcacgagaaggtgctggcgatcgtaaacgcgctggccgaaaacagggccatccggcccgacgaggccggcctggtctacgacgcgctgcttcagcgcgtggctcgttacaacagcggcaacgtgcagaccaacctggaccggctggtgggggatgtgcgcgaggccgtggcgcagcgtgagcgcgcgcagcagcagggcaacctgggctccatggttgcactaaacgccttcctgagtacacagcccgccaacgtgccgcggggacaggaggactacaccaactttgtgagcgcactgcggctaatggtgactgagacaccgcaaagtgaggtgtaccagtctgggccagactattttttccagaccagtagacaaggcctgcagaccgtaaacctgagccaggctttcaaaaacttgcaggggctgtggggggtgcgggctcccacaggcgaccgcgcgaccgtgtctagcttgctgacgcccaactcgcgcctgttgctgctgctaatagcgcccttcacggacagtggcagcgtgtcccgggacacatacctaggtcacttgctgacactgtaccgcgaggccataggtcaggcgcatgtggacgagcatactttccaggagattacaagtgtcagccgcgcgctggggcaggaggacacgggcagcctggaggcaaccctaaactacctgctgaccaaccggcggcagaagatcccctcgttgcacagtttaaacagcgaggaggagcgcattttgcgctacgtgcagcagagcgtgagccttaacctgatgcgcgacggggtaacgcccagcgtggcgctggacatgaccgcgcgcaacatggaaccgggcatgtatgcctcaaaccggccgtttatcaaccgcctaatggactacttgcatcgcgcggccgccgtgaaccccgagtatttcaccaatgccatcttgaacccgcactggctaccgccccctggtttctacaccgggggattcgaggtgcccgagggtaacgatggattcctctgggacgacatagacgacagcgtgttttccccgcaaccgcagaccctgctagagttgcaacagcgcgagcaggcagaggcggcgctgcgaaaggaaagcttccgcaggccaagcagcttgtccgatctaggcgctgcggccccgcggtcagatgctagtagcccatttccaagcttgatagggtctcttaccagcactcgcaccacccgcccgcgcctgctgggcgaggaggagtacctaaacaactcgctgctgcagccgcagcgcgaaaaaaacctgcctccggcatttcccaacaacgggatagagagcctagtggacaagatgagtagatggaagacgtacgcgcaggagcacagggacgtgccaggcccgcgcccgcccacccgtcgtcaaaggcacgaccgtcagcggggtctggtgtgggaggacgatgactcggcagacgacagcagcgtcctggatttgggagggagtggcaacccgtttgcgcaccttcgccccaggctggggagaatgttttaaaaaaaaaaaagcatgatgcaaaataaaaaactcaccaaggccatggcaccgagcgttggttttcttgtattccccttagtatgcggcgcgcggcgatgtatgaggaaggtcctcctccctcctacgagagtgtggtgagcgcggcgccagtggcggcggcgctgggttctcccttcgatgctcccctggacccgccgtttgtgcctccgcggtacctgcggcctaccggggggagaaacagcatccgttactctgagttggcacccctattcgacaccacccgtgtgtacctggtggacaacaagtcaacggatgtggcatccctgaactaccagaacgaccacagcaactttctgaccacggtcattcaaaacaatgactacagcccgggggaggcaagcacacagaccatcaatcttgacgaccggtcgcactggggcggcgacctgaaaaccatcctgcataccaacatgccaaatgtgaacgagttcatgtttaccaataagtttaaggcgcgggtgatggtgtcgcgcttgcctactaaggacaatcaggtggagctgaaatacgagtgggtggagttcacgctgcccgagggcaactactccgagaccatgaccatagaccttatgaacaacgcgatcgtggagcactacttgaaagtgggcagacagaacggggttctggaaagcgacatcggggtaaagtttgacacccgcaacttcagactggggtttgaccccgtcactggtcttgtcatgcctggggtatatacaaacgaagccttccatccagacatcattttgctgccaggatgcggggtggacttcacccacagccgcctgagcaacttgttgggcatccgcaagcggcaacccttccaggagggctttaggatcacctacgatgatctggagggtggtaacattcccgcactgttggatgtggacgcctaccaggcgagcttgaaagatgacaccgaacagggcgggggtggcgcaggcggcagcaacagcagtggcagcggcgcggaagagaactccaacgcggcagccgcggcaatgcagccggtggaggacatgaacgatcatgccattcgcggcgacacctttgccacacgggctgaggagaagcgcgctgaggccgaagcagcggccgaagctgccgcccccgctgcgcaacccgaggtcgagaagcctcagaagaaaccggtgatcaaacccctgacagaggacagcaagaaacgcagttacaacctaataagcaatgacagcaccttcacccagtaccgcagctggtaccttgcatacaactacggcgaccctcagaccggaatccgctcatggaccctgctttgcactcctgacgtaacctgcggctcggagcaggtctactggtcgttgccagacatgatgcaagaccccgtgaccttccgctccacgcgccagatcagcaactttccggtggtgggcgccgagctgttgcccgtgcactccaagagcttctacaacgaccaggccgtctactcccaactcatccgccagtttacctctctgacccacgtgttcaatcgctttcccgagaaccagattttggcgcgcccgccagcccccaccatcaccaccgtcagtgaaaacgttcctgctctcacagatcacgggacgctaccgctgcgcaacagcatcggaggagtccagcgagtgaccattactgacgccagacgccgcacctgcccctacgtttacaaggccctgggcatagtctcgccgcgcgtcctatcgagccgcactttttgagcaagcatgtccatccttatatcgcccagcaataacacaggctggggcctgcgcttcccaagcaagatgtttggcggggccaagaagcgctccgaccaacacccagtgcgcgtgcgcgggcactaccgcgcgccctggggcgcgcacaaacgcggccgcactgggcgcaccaccgtcgatgacgccatcgacgcggtggtggaggaggcgcgcaactacacgcccacgccgccaccagtgtccacagtggacgcggccattcagaccgtggtgcgcggagcccggcgctatgctaaaatgaagagacggcggaggcgcgtagcacgtcgccaccgccgccgacccggcactgccgcccaacgcgcggcggcggccctgcttaaccgcgcacgtcgcaccggccgacgggcggccatgcgggccgctcgaaggctggccgcgggtattgtcactgtgccccccaggtccaggcgacgagcggccgccgcagcagccgcggccattagtgctatgactcagggtcgcaggggcaacgtgtattgggtgcgcgactcggttagcggcctgcgcgtgcccgtgcgcacccgccccccgcgcaactagattgcaagaaaaaactacttagactcgtactgttgtatgtatccagcggcggcggcgcgcaacgaagctatgtccaagcgcaaaatcaaagaagagatgctccaggtcatcgcgccggagatctatggccccccgaagaaggaagagcaggattacaagccccgaaagctaaagcgggtcaaaaagaaaaagaaagatgatgatgatgaacttgacgacgaggtggaactgctgcacgctaccgcgcccaggcgacgggtacagtggaaaggtcgacgcgtaaaacgtgttttgcgacccggcaccaccgtagtctttacgcccggtgagcgctccacccgcacctacaagcgcgtgtatgatgaggtgtacggcgacgaggacctgcttgagcaggccaacgagcgcctcggggagtttgcctacggaaagcggcataaggacatgctggcgttgccgctggacgagggcaacccaacacctagcctaaagcccgtaacactgcagcaggtgctgcccgcgcttgcaccgtccgaagaaaagcgcggcctaaagcgcgagtctggtgacttggcacccaccgtgcagctgatggtacccaagcgccagcgactggaagatgtcttggaaaaaatgaccgtggaacctgggctggagcccgaggtccgcgtgcggccaatcaagcaggtggcgccgggactgggcgtgcagaccgtggacgttcagatacccactaccagtagcaccagtattgccaccgccacagagggcatggagacacaaacgtccccggttgcctcagcggtggcggatgccgcggtgcaggcggtcgctgcggccgcgtccaagacctctacggaggtgcaaacggacccgtggatgtttcgcgtttcagccccccggcgcccgcgccgttcgaggaagtacggcgccgccagcgcgctactgcccgaatatgccctacatccttccattgcgcctacccccggctatcgtggctacacctaccgccccagaagacgagcaactacccgacgccgaaccaccactggaacccgccgccgccgtcgccgtcgccagcccgtgctggccccgatttccgtgcgcagggtggctcgcgaaggaggcaggaccctggtgctgccaacagcgcgctaccaccccagcatcgtttaaaagccggtctttgtggttcttgcagatatggccctcacctgccgcctccgtttcccggtgccgggattccgaggaagaatgcaccgtaggaggggcatggccggccacggcctgacgggcggcatgcgtcgtgcgcaccaccggcggcggcgcgcgtcgcaccgtcgcatgcgcggcggtatcctgcccctccttattccactgatcgccgcggcgattggcgccgtgcccggaattgcatccgtggccttgcaggcgcagagacactgattaaaaacaagttgcatgtggaaaaatcaaaataaaaagtctggactctcacgctcgcttggtcctgtaactattttgtagaatggaagacatcaactttgcgtctctggccccgcgacacggctcgcgcccgttcatgggaaactggcaagatatcggcaccagcaatatgagcggtggcgccttcagctggggctcgctgtggagcggcattaaaaatttcggttccaccgttaagaactatggcagcaaggcctggaacagcagcacaggccagatgctgagggataagttgaaagagcaaaatttccaacaaaaggtggtagatggcctggcctctggcattagcggggtggtggacctggccaaccaggcagtgcaaaataagattaacagtaagcttgatccccgccctcccgtagaggagcctccaccggccgtggagacagtgtctccagaggggcgtggcgaaaagcgtccgcgccccgacagggaagaaactctggtgacgcaaatagacgagcctccctcgtacgaggaggcactaaagcaaggcctgcccaccacccgtcccatcgcgcccatggctaccggagtgctgggccagcacacacccgtaacgctggacctgcctccccccgccgacacccagcagaaacctgtgctgccaggcccgaccgccgttgttgtaacccgtcctagccgcgcgtccctgcgccgcgccgccagcggtccgcgatcgttgcggcccgtagccagtggcaactggcaaagcacactgaacagcatcgtgggtctgggggtgcaatccctgaagcgccgacgatgcttctgatagctaacgtgtcgtatgtgtgtcatgtatgcgtccatgtcgccgccagaggagctgctgagccgccgcgcgcccgctttccaagatggctaccccttcgatgatgccgcagtggtcttacatgcacatctcgggccaggacgcctcggagtacctgagccccgggctggtgcagtttgcccgcgccaccgagacgtacttcagcctgaataacaagtttagaaaccccacggtggcgcctacgcacgacgtgaccacagaccggtcccagcgtttgacgctgcggttcatccctgtggaccgtgaggatactgcgtactcgtacaaggcgcggttcaccctagctgtgggtgataaccgtgtgctggacatggcttccacgtactttgacatccgcggcgtgctggacaggggccctacttttaagccctactctggcactgcctacaacgccctggctcccaagggtgccccaaatccttgcgaatgggatgaagctgctactgctcttgaaataaacctagaagaagaggacgatgacaacgaagacgaagtagacgagcaagctgagcagcaaaaaactcacgtatttgggcaggcgccttattctggtataaatattacaaaggagggtattcaaataggtgtcgaaggtcaaacacctaaatatgccgataaaacatttcaacctgaacctcaaataggagaatctcagtggtacgaaacagaaattaatcatgcagctgggagagtcctaaaaaagactaccccaatgaaaccatgttacggttcatatgcaaaacccacaaatgaaaatggagggcaaggcattcttgtaaagcaacaaaatggaaagctagaaagtcaagtggaaatgcaatttttctcaactactgaggcagccgcaggcaatggtgataacttgactcctaaagtggtattgtacagtgaagatgtagatatagaaaccccagacactcatatttcttacatgcccactattaaggaaggtaactcacgagaactaatgggccaacaatctatgcccaacaggcctaattacattgcttttagggacaattttattggtctaatgtattacaacagcacgggtaatatgggtgttctggcgggccaagcatcgcagttgaatgctgttgtagatttgcaagacagaaacacagagctttcataccagcttttgcttgattccattggtgatagaaccaggtacttttctatgtggaatcaggctgttgacagctatgatccagatgttagaattattgaaaatcatggaactgaagatgaacttccaaattactgctttccactgggaggtgtgattaatacagagactcttaccaaggtaaaacctaaaacaggtcaggaaaatggatgggaaaaagatgctacagaattttcagataaaaatgaaataagagttggaaataattttgccatggaaatcaatctaaatgccaacctgtggagaaatttcctgtactccaacatagcgctgtatttgcccgacaagctaaagtacagtccttccaacgtaaaaatttctgataacccaaacacctacgactacatgaacaagcgagtggtggctcccgggctagtggactgctacattaaccttggagcacgctggtcccttgactatatggacaacgtcaacccatttaaccaccaccgcaatgctggcctgcgctaccgctcaatgttgctgggcaatggtcgctatgtgcccttccacatccaggtgcctcagaagttctttgccattaaaaacctccttctcctgccgggctcatacacctacgagtggaacttcaggaaggatgttaacatggttctgcagagctccctaggaaatgacctaagggttgacggagccagcattaagtttgatagcatttgcctttacgccaccttcttccccatggcccacaacaccgcctccacgcttgaggccatgcttagaaacgacaccaacgaccagtcctttaacgactatctctccgccgccaacatgctctaccctatacccgccaacgctaccaacgtgcccatatccatcccctcccgcaactgggcggctttccgcggctgggccttcacgcgccttaagactaaggaaaccccatcactgggctcgggctacgacccttattacacctactctggctctataccctacctagatggaaccttttacctcaaccacacctttaagaaggtggccattacctttgactcttctgtcagctggcctggcaatgaccgcctgcttacccccaacgagtttgaaattaagcgctcagttgacggggagggttacaacgttgcccagtgtaacatgaccaaagactggttcctggtacaaatgctagctaactataacattggctaccagggcttctatatcccagagagctacaaggaccgcatgtactccttctttagaaacttccagcccatgagccgtcaggtggtggatgatactaaatacaaggactaccaacaggtgggcatcctacaccaacacaacaactctggatttgttggctaccttgcccccaccatgcgcgaaggacaggcctaccctgctaacttcccctatccgcttataggcaagaccgcagttgacagcattacccagaaaaagtttctttgcgatcgcaccctttggcgcatcccattctccagtaactttatgtccatgggcgcactcacagacctgggccaaaaccttctctacgccaactccgcccacgcgctagacatgacttttgaggtggatcccatggacgagcccacccttctttatgttttgtttgaagtctttgacgtggtccgtgtgcaccagccgcaccgcggcgtcatcgaaaccgtgtacctgcgcacgcccttctcggccggcaacgccacaacataaagaagcaagcaacatcaacaacagctgccgccatgggctccagtgagcaggaactgaaagccattgtcaaagatcttggttgtgggccatattttttgggcacctatgacaagcgctttccaggctttgtttctccacacaagctcgcctgcgccatagtcaatacggccggtcgcgagactgggggcgtacactggatggcctttgcctggaacccgcactcaaaaacatgctacctctttgagccctttggcttttctgaccagcgactcaagcaggtttaccagtttgagtacgagtcactcctgcgccgtagcgccattgcttcttcccccgaccgctgtataacgctggaaaagtccacccaaagcgtacaggggcccaactcggccgcctgtggactattctgctgcatgtttctccacgcctttgccaactggccccaaactcccatggatcacaaccccaccatgaaccttattaccggggtacccaactccatgctcaacagtccccaggtacagcccaccctgcgtcgcaaccaggaacagctctacagcttcctggagcgccactcgccctacttccgcagccacagtgcgcagattaggagcgccacttctttttgtcacttgaaaaacatgtaaaaataatgtactagagacactttcaataaaggcaaatgcttttatttgtacactctcgggtgattatttacccccacccttgccgtctgcgccgtttaaaaatcaaaggggttctgccgcgcatcgctatgcgccactggcagggacacgttgcgatactggtgtttagtgctccacttaaactcaggcacaaccatccgcggcagctcggtgaagttttcactccacaggctgcgcaccatcaccaacgcgtttagcaggtcgggcgccgatatcttgaagtcgcagttggggcctccgccctgcgcgcgcgagttgcgatacacagggttgcagcactggaacactatcagcgccgggtggtgcacgctggccagcacgctcttgtcggagatcagatccgcgtccaggtcctccgcgttgctcagggcgaacggagtcaactttggtagctgccttcccaaaaagggcgcgtgcccaggctttgagttgcactcgcaccgtagtggcatcaaaaggtgaccgtgcccggtctgggcgttaggatacagcgcctgcataaaagccttgatctgcttaaaagccacctgagcctttgcgccttcagagaagaacatgccgcaagacttgccggaaaactgattggccggacaggccgcgtcgtgcacgcagcaccttgcgtcggtgttggagatctgcaccacatttcggccccaccggttcttcacgatcttggccttgctagactgctccttcagcgcgcgctgcccgttttcgctcgtcacatccatttcaatcacgtgctccttatttatcataatgcttccgtgtagacacttaagctcgccttcgatctcagcgcagcggtgcagccacaacgcgcagcccgtgggctcgtgatgcttgtaggtcacctctgcaaacgactgcaggtacgcctgcaggaatcgccccatcatcgtcacaaaggtcttgttgctggtgaaggtcagctgcaacccgcggtgctcctcgttcagccaggtcttgcatacggccgccagagcttccacttggtcaggcagtagtttgaagttcgcctttagatcgttatccacgtggtacttgtccatcagcgcgcgcgcagcctccatgcccttctcccacgcagacacgatcggcacactcagcgggttcatcaccgtaatttcactttccgcttcgctgggctcttcctcttcctcttgcgtccgcataccacgcgccactgggtcgtcttcattcagccgccgcactgtgcgcttacctcctttgccatgcttgattagcaccggtgggttgctgaaacccaccatttgtagcgccacatcttctctttcttcctcgctgtccacgattacctctggtgatggcgggcgctcgggcttgggagaagggcgcttctttttcttcttgggcgcaatggccaaatccgccgccgaggtcgatggccgcgggctgggtgtgcgcggcaccagcgcgtcttgtgatgagtcttcctcgtcctcggactcgatacgccgcctcatccgcttttttgggggcgcccggggaggcggcggcgacggggacggggacgacacgtcctccatggttgggggacgtcgcgccgcaccgcgtccgcgctcgggggtggtttcgcgctgctcctcttcccgactggccatttccttctcctataggcagaaaaagatcatggagtcagtcgagaagaaggacagcctaaccgccccctctgagttcgccaccaccgcctccaccgatgccgccaacgcgcctaccaccttccccgtcgaggcacccccgcttgaggaggaggaagtgattatcgagcaggacccaggttttgtaagcgaagacgacgaggaccgctcagtaccaacagaggataaaaagcaagaccaggacaacgcagaggcaaacgaggaacaagtcgggcggggggacgaaaggcatggcgactacctagatgtgggagacgacgtgctgttgaagcatctgcagcgccagtgcgccattatctgcgacgcgttgcaagagcgcagcgatgtgcccctcgccatagcggatgtcagccttgcctacgaacgccacctattctcaccgcgcgtaccccccaaacgccaagaaaacggcacatgcgagcccaacccgcgcctcaacttctaccccgtatttgccgtgccagaggtgcttgccacctatcacatctttttccaaaactgcaagatacccctatcctgccgtgccaaccgcagccgagcggacaagcagctggccttgcggcagggcgctgtcatacctgatatcgcctcgctcaacgaagtgccaaaaatctttgagggtcttggacgcgacgagaagcgcgcggcaaacgctctgcaacaggaaaacagcgaaaatgaaagtcactctggagtgttggtggaactcgagggtgacaacgcgcgcctagccgtactaaaacgcagcatcgaggtcacccactttgcctacccggcacttaacctaccccccaaggtcatgagcacagtcatgagtgagctgatcgtgcgccgtgcgcagcccctggagagggatgcaaatttgcaagaacaaacagaggagggcctacccgcagttggcgacgagcagctagcgcgctggcttcaaacgcgcgagcctgccgacttggaggagcgacgcaaactaatgatggccgcagtgctcgttaccgtggagcttgagtgcatgcagcggttctttgctgacccggagatgcagcgcaagctagaggaaacattgcactacacctttcgacagggctacgtacgccaggcctgcaagatctccaacgtggagctctgcaacctggtctcctaccttggaattttgcacgaaaaccgccttgggcaaaacgtgcttcattccacgctcaagggcgaggcgcgccgcgactacgtccgcgactgcgtttacttatttctatgctacacctggcagacggccatgggcgtttggcagcagtgcttggaggagtgcaacctcaaggagctgcagaaactgctaaagcaaaacttgaaggacctatggacggccttcaacgagcgctccgtggccgcgcacctggcggacatcattttccccgaacgcctgcttaaaaccctgcaacagggtctgccagacttcaccagtcaaagcatgttgcagaactttaggaactttatcctagagcgctcaggaatcttgcccgccacctgctgtgcacttcctagcgactttgtgcccattaagtaccgcgaatgccctccgccgctttggggccactgctaccttctgcagctagccaactaccttgcctaccactctgacataatggaagacgtgagcggtgacggtctactggagtgtcactgtcgctgcaacctatgcaccccgcaccgctccctggtttgcaattcgcagctgcttaacgaaagtcaaattatcggtacctttgagctgcagggtccctcgcctgacgaaaagtccgcggctccggggttgaaactcactccggggctgtggacgtcggcttaccttcgcaaatttgtacctgaggactaccacgcccacgagattaggttctacgaagaccaatcccgcccgcctaatgcggagcttaccgcctgcgtcattacccagggccacattcttggccaattgcaagccatcaacaaagcccgccaagagtttctgctacgaaagggacggggggtttacttggacccccagtccggcgaggagctcaacccaatccccccgccgccgcagccctatcagcagcagccgcgggcccttgcttcccaggatggcacccaaaaagaagctgcagctgccgccgccacccacggacgaggaggaatactgggacagtcaggcagaggaggttttggacgaggaggaggaggacatgatggaagactgggagagcctagacgaggaagcttccgaggtcgaagaggtgtcagacgaaacaccgtcaccctcggtcgcattcccctcgccggcgccccagaaatcggcaaccggttccagcatggctacaacctccgctcctcaggcgccgccggcactgcccgttcgccgacccaaccgtagatgggacaccactggaaccagggccggtaagtccaagcagccgccgccgttagcccaagagcaacaacagcgccaaggctaccgctcatggcgcgggcacaagaacgccatagttgcttgcttgcaagactgtgggggcaacatctccttcgcccgccgctttcttctctaccatcacggcgtggccttcccccgtaacatcctgcattactaccgtcatctctacagcccatactgcaccggcggcagcggcagcaacagcagcggccacacagaagcaaaggcgaccggatagcaagactctgacaaagcccaagaaatccacagcggcggcagcagcaggaggaggagcgctgcgtctggcgcccaacgaacccgtatcgacccgcgagcttagaaacaggatttttcccactctgtatgctatatttcaacagagcaggggccaagaacaagagctgaaaataaaaaacaggtctctgcgatccctcacccgcagctgcctgtatcacaaaagcgaagatcagcttcggcgcacgctggaagacgcggaggctctcttcagtaaatactgcgcgctgactcttaaggactagtttcgcgccctttctcaaatttaagcgcgaaaactacgtcatctccagcggccacacccggcgccagcacctgttgtcagcgccattatgagcaaggaaattcccacgccctacatgtggagttaccagccacaaatgggacttgcggctggagctgcccaagactactcaacccgaataaactacatgagcgcgggaccccacatgatatcccgggtcaacggaatacgcgcccaccgaaaccgaattctcctggaacaggcggctattaccaccacacctcgtaataaccttaatccccgtagttggcccgctgccctggtgtaccaggaaagtcccgctcccaccactgtggtacttcccagagacgcccaggccgaagttcagatgactaactcaggggcgcagcttgcgggcggctttcgtcacagggtgcggtcgcccgggcagggtataactcacctgacaatcagagggcgaggtattcagctcaacgacgagtcggtgagctcctcgcttggtctccgtccggacgggacatttcagatcggcggcgccggccgctcttcattcacgcctcgtcaggcaatcctaactctgcagacctcgtcctctgagccgcgctctggaggcattggaactctgcaatttattgaggagtttgtgccatcggtctactttaaccccttctcgggacctcccggccactatccggatcaatttattcctaactttgacgcggtaaaggactcggcggacggctacgactgaatgttaagtggagaggcagagcaactgcgcctgaaacacctggtccactgtcgccgccacaagtgctttgcccgcgactccggtgagttttgctactttgaattgcccgaggatcatatcgagggcccggcgcacggcgtccggcttaccgcccagggagagcttgcccgtagcctgattcgggagtttacccagcgccccctgctagttgagcgggacaggggaccctgtgttctcactgtgatttgcaactgtcctaaccctggattacatcaagatcctctagttaatgtcaggtcgcctaagtcgattaactagagtacccggggatcttattccctttaactaataaaaaaaaataataaagcatcacttacttaaaatcagttagcaaatttctgtccagtttattcagcagcacctccttgccctcctcccagctctggtattgcagcttcctcctggctgcaaactttctccacaatctaaatggaatgtcagtttcctcctgttcctgtccatccgcacccactatcttcatgttgttgcagatgaagcgcgcaagaccgtctgaagataccttcaaccccgtgtatccatatgacacggaaaccggtcctccaactgtgccttttcttactcctccctttgtatcccccaatgggtttcaagagagtccccctggggtactctctttgcgcctatccgaacctctagttacctccaatggcatgcttgcgctcaaaatgggcaacggcctctctctggacgaggccggcaaccttacctcccaaaatgtaaccactgtgagcccacctctcaaaaaaaccaagtcaaacataaacctggaaatatctgcacccctcacagttacctcagaagccctaactgtggctgccgccgcacctctaatggtcgcgggcaacacactcaccatgcaatcacaggccccgctaaccgtgcacgactccaaacttagcattgccacccaaggacccctcacagtgtcagaaggaaagctagccctgcaaacatcaggccccctcaccaccaccgatagcagtacccttactatcactgcctcaccccctctaactactgccactggtagcttgggcattgacttgaaagagcccatttatacacaaaatggaaaactaggactaaagtacggggctcctttgcatgtaacagacgacctaaacactttgaccgtagcaactggtccaggtgtgactattaataatacttccttgcaaactaaagttactggagccttgggttttgattcacaaggcaatatgcaacttaatgtagcaggaggactaaggattgattctcaaaacagacgccttatacttgatgttagttatccgtttgatgctcaaaaccaactaaatctaagactaggacagggccctctttttataaactcagcccacaacttggatattaactacaacaaaggcctttacttgtttacagcttcaaacaattccaaaaagcttgaggttaacctaagcactgccaaggggttgatgtttgacgctacagccatagccattaatgcaggagatgggcttgaatttggttcacctaatgcaccaaacacaaatcccctcaaaacaaaaattggccatggcctagaatttgattcaaacaaggctatggttcctaaactaggaactggccttagttttgacagcacaggtgccattacagtaggaaacaaaaataatgataagctaactttgtggaccggaataaaccctccacctaactgtcaaattgtggaaaacactaatacaaatgatggcaaacttactttagtattagtaaaaaatggagggcttgttaatggctacgtgtctctagttggtgtatcagacactgtgaaccaaatgttcacacaaaagacagcaaacatccaattaagattatattttgactcttctggaaatctattaactgaggaatcagacttaaaaattccacttaaaaataaatcttctacagcgaccagtgaaactgtagccagcagcaaagcctttatgccaagtactacagcttatcccttcaacaccactactagggatagtgaaaactacattcatggaatatgttactacatgactagttatgatagaagtctatttcccttgaacatttctataatgctaaacagccgtatgatttcttccaatgttgcctatgccatacaatttgaatggaatctaaatgcaagtgaatctccagaaagcaacatagctacgctgaccacatccccctttttcttttcttacattacagaagacgacaactaaagaatcgtttgtgttatgtttcaacgtgtttatttttcaattgcagaaaatttcaagtcatttttcattcagtagtatagccccaccaccacatagcttatacagatcaccgtaccttaatcaaactcacagaaccctagtattcaacctgccacctccctcccaacacacagagtacacagtcctttctccccggctggccttaaaaagcatcatatcatgggtaacagacatattcttaggtgttatattccacacggtttcctgtcgagccaaacgctcatcagtgatattaataaactccccgggcagctcacttaagttcatgtcgctgtccagctgctgagccacaggctgctgtccaacttgcggttgcttaacgggcggcgaaggagaagtccacgctcagtcataatcgtgcatcaggatagggcggtggtgctgcagcagcgcgcgaataaactgctgccgccgccgctccgtcctgcaggaatacaacatggcagtggtctcctcagcgatgattcgcaccgcccgcagcataaggcgccttgtcctccgggcacagcagcgcaccctgatctcacttaaatcagcacagtaactgcagcacagcaccacaatattgttcaaaatcccacagtgcaaggcgctgtatccaaagctcatggcggggaccacagaacccacgtggccatcataccacaagcgcaggtagattaagtggcgacccctcataaacacgctggacataaacattacctcttttggcatgttgtaattcaccacctcccggtaccatataaacctctgattaaacatggcgccatccaccaccatcctaaaccagctggccaaaacctgcccgccggctatacactgcagggaaccgggactggaacaatgacagtggagagcccaggactcgtaaccatggatcatcatgctcgtcatgatatcaatgttggcacaacacaggcacacgtgcatacacttcctcaggattacaagctcctcccgcgttagaaccatatcccagggaacaacccattcctgaatcagcgtaaatcccacactgcagggaagacctcgcacgtaactcacgttgtgcattgtcaaagtgttacattcgggcagcagcggatgatcctccagtatggtagcgcgggtttctgtctcaaaaggaggtagacgatccctactgtacggagtgcgccgagacaaccgagatcgtgttggtcgtagtgtcatgccaaatggaacgccggacgtagtcatatttcctgaagcaaaaccaggtgcgggcgtgacaaacagatctgcgtctccggtctcgccgcttagatcgctctgtgtagtagttgtagtatatccactctctcaaagcatccaggcgccccctggcttcgggttctatgtaaactccttcatgcgccgctgccctgataacatccaccaccgcagaataagccacacccagccaacctacacattcgttctgcgagtcacacacgggaggagcgggaagagctggaagaaccatgtttttttttttattccaaaagattatccaaaacctcaaaatgaagatctattaagtgaacgcgctcccctccggtggcgtggtcaaactctacagccaaagaacagataatggcatttgtaagatgttgcacaatggcttccaaaaggcaaacggccctcacgtccaagtggacgtaaaggctaaacccttcagggtgaatctcctctataaacattccagcaccttcaaccatgcccaaataattctcatctcgccaccttctcaatatatctctaagcaaatcccgaatattaagtccggccattgtaaaaatctgctccagagcgccctccaccttcagcctcaagcagcgaatcatgattgcaaaaattcaggttcctcacagacctgtataagattcaaaagcggaacattaacaaaaataccgcgatcccgtaggtcccttcgcagggccagctgaacataatcgtgcaggtctgcacggaccagcgcggccacttccccgccaggaaccatgacaaaagaacccacactgattatgacacgcatactcggagctatgctaaccagcgtagccccgatgtaagcttgttgcatgggcggcgatataaaatgcaaggtgctgctcaaaaaatcaggcaaagcctcgcgcaaaaaagaaagcacatcgtagtcatgctcatgcagataaaggcaggtaagctccggaaccaccacagaaaaagacaccatttttctctcaaacatgtctgcgggtttctgcataaacacaaaataaaataacaaaaaaacatttaaacattagaagcctgtcttacaacaggaaaaacaacccttataagcataagacggactacggccatgccggcgtgaccgtaaaaaaactggtcaccgtgattaaaaagcaccaccgacagctcctcggtcatgtccggagtcataatgtaagactcggtaaacacatcaggttgattcacatcggtcagtgctaaaaagcgaccgaaatagcccgggggaatacatacccgcaggcgtagagacaacattacagcccccataggaggtataacaaaattaataggagagaaaaacacataaacacctgaaaaaccctcctgcctaggcaaaatagcaccctcccgctccagaacaacatacagcgcttccacagcggcagccataacagtcagccttaccagtaaaaaagaaaacctattaaaaaaacaccactcgacacggcaccagctcaatcagtcacagtgtaaaaaagggccaagtgcagagcgagtatatataggactaaaaaatgacgtaacggttaaagtccacaaaaaacacccagaaaaccgcacgcgaacctacgcccagaaacgaaagccaaaaaacccacaacttcctcaaatcgtcacttccgttttcccacgttacgtcacttcccattttaagaaaactacaattcccaacacatacaagttactccgccctaaaacctacgtcacccgccccgttcccacgccccgcgccacgtcacaaactccaccccctcattatcatattggcttcaatccaaaataaggtatattattgatgatg

SEQ ID NO: 42 - DNA, 36138 bp, Artificial Sequence
  Adk35RF-Spike/E4orf6(RSV)-E4dl-27(E4re#40)
ttaattaacatcatcaataatataccttattttggattgaagccaatatgataatgagggggtggagtttgtgacgtggcgcggggcgtgggaacggggcgggtgacgtagtagtgtggcggaagtgtgatgttgcaagtgtggcggaacacatgtaagcgacggatgtggcaaaagtgacgtttttggtgtgcgccggtgtacacaggaagtgacaattttcgcgcggttttaggcggatgttgtagtaaatttgggcgtaaccgagtaagatttggccattttcgcgggaaaactgaataagaggaagtgaaatctgaataattttgtgttactcatagcgcgtaataatttgatccgcgttaagatacattgatgagtttggacaaaccacaactagaatgcagtgaaaaaaatgctttatttgtgaaatttgtgatgctattgctttatttgtaaccattataagctgcaataaacaagttaacaacaacaattgcattcattttatgtttcaggttcagggggaggtgtgggaggttttttaaagcaagtaaaacctctacaaatgtggtatggctgattatgatcaattttcatggccacttgatgtattgttcatatttgcccagttcttggaggtcaatcagggactcattcaggttcttagccacctcattcagtctgtcaatctccttctggatgttcaccacagaggcattgatgccagagatgtctcccaggtccacatcagggctggtgtggttcttgaagtatttgtccagttcctccttgaaggagtccagttcaggttggagtgggtcatagactgtgttgttcacaatgccaatcaccacatcacagttgccagacacaaaggtgttgtctgtggtgataatctgtggttcatagaagttcctctgggtcacaaaccagtgggtgccattgctcacaaacactccctcccttggaaagtgagccttgccatcatggcagatggcaggggctgtggtgaagttcttctcctgggcaggcacataggtcacatgcaggaacaccactccatgaggggcagactgtggaaaactcatcaggtggtagcccttgccacagaagtccaccctcttgctttgtcccagcacacactcactcatcttggtggcagccaggttggcagatgccctaatctcagcagccctgataagttgttgggtcacataggtttggagggattggagtctgcctgtaatcagtctgtcaatctggacctcagcctccaccttgtccagtctgctcaggatgtcattcagcacagaggagatggctccaaagttgctggaaagttgcttcaccagggtgttcagagcctgggcattctggttcaccacatcttggagtttgcccagggcagaggctgtgctggacagggagtcctgaatcttgccaatggcagagttgaactggttggcaatcagtttctggttctcatagagcacattctgggtcactccaatgccattgaacctgtaagccatctgcatagcaaatgggatttggagggctgctcctgctccaaaggtccagccagaggtgatggtgccagccagcagggcagaggtgtattgggcaatcatctcatctgtcagcagtggaggcagcactgtcagtccattgaacttctgggcacaaatcaggtccctggcagcaatgtctcccagacagtctccatattgcttgatgaagccagcatcagccagggtcaccttgttgaacagcaggtcctcaatgaaggacctcttgcttggcttgcttgggtcaggcagaatctggctgaagttgaagcctccaaagtccttgattggaggtgtcttgtaaatctgcttcacctgggcaaacacctcctgggtgttcttgtcctgttccacagcaatgcctgtcagagccctgttaagttgggtacagaaggagccatattggagcagcaggttgctacactctgtgctgtctccacagatatacattgtacagtccacagaggtcttggtcatactcacaggcagaatctctgtggtcacagagatggtgaagttggttgggatggcaatgctgttgttgctgtaagccacagagttctctgctcccagactcattgtgtaggcaatgatgctctggcttgccacagacctcgacccaccgccaccggtctgggtctggtaggaggcacagatgcctgctccaattgggatgtcacactcataggagttgttcacatgctctgctccaatcagacagccagccctggtctggaacacattgctgcctgtgctgtagaccctccaggttggtgtaagttggtcagcatggatagccacaggcacctcagtacagttcacatcctggtagagcacagccacctggttgctggtgttggtgccaggtgtaatcacagacactcctccaaaggaacatggtgtgatgtccagaatctccaaggtctgtgggtccctcacagcatctgtggtgtcagcaatgtccctgccaaactgttggaatggcaggaacttcttgttgctctctgtcagcactcctgtgcctgtcagtccattgaagttgaagttcacacacttgttcttcaccaggttggtgctcttctttggtccacacactgtggcaggggcatggagcagttcaaaggacagcaccaccaccctgtatggttggtagcccactccattggttggttggaagccataggattggagtggaaagtaacagttgaagccctccactccattacatggtgtgctgccagcctggtaaatctctgtgctgatgtccctctcaaatggtttcaggttgctcttcctgaacagtctgtagaggtagttgtagttgcctcccaccttgctgtccaggttgttgctgttccaggcaatcacacagcctgtgaagtcatcaggcagtttgtagttgtagtcagcaatcttgcctgtttgtccaggggcaatctgtctcacctcatctcccctaatcacaaaggagtcagcatagacattggtgaaacacaggtcattcagtttggttgggctcactccataacacttgaaggtgctgaaggaggcagagttgtagagcacagagtagtcagccacacagttgctaatcctcttcctgttccaggcatagacagaggcaaacctggtggcattgaacacctctccaaatggacacaggttggtgatgtttggaaacctcacaatgctctctgttggttggaccctgaagttgctggtctggtagatgcccttctccactgtgaaggatttcagggtacacttggtctcagacagtgggtccagggcacagtccacagcatctgtgatggtgccattctcattgtatttcagcaggaaggtccttggttggaggtagcccacatagtaggctgctgctcctgctgtccagccagaggaggagtctccaggtgtcaggtaggacctgtgcagagccagcagggtctggaacctggtgatgttgatgccaattggcaggtccaccagtggttccaaggcagagaagccctgtggcaggtccctcaccaggttgattggtgtgtgtttgctgtaaatcttgaagtagccatcaatgttcttgaacacaaactccctcaggttcttgaagttgccctgcttgccctccaagtccatcaggaatggttggctcacatattcaaaggtacagttgttggcagaggagtagaccctgaactcagactccatccaggacttgttgttcttgtggtagtagactcccaggaatgggtcattacagaactggaactcacacaccttaatcaccacattggtggcattgttcacaatcagcagggactgggtcttgctgtccagggtggtgccaaaaatccagcccctgatgatgttgctcttctctgtgctggcaaagtagactccatcattgaatggcagcacagggttgtcaaacctcttggtgccattggtgccagacacatggatggcatggaaccaggtcacattgctgaagaatggcaggaacaggtcctgggtgctgtgcagcacagaggacctgaacaccttgtcagggtagtagactcccctggtgaaggagttggtgtaggcaggaggaagttgggtcctggtggtcaggttcacacactggctggacaccagtggcagcagcaccaggaacacaaacatggtggcaaatcggaggctggatcggtcccggtgtcttctatggaggtcaaaacagcgtggatggcgtctccaggcgatctgacggttcactaaacgagctcgtcgacgatctctatcactgatagggagatctctatcactgatagggagagctctgcttatatagacctcccaccgtacacgcctaccgcccatttgcgtcaatggggcggagttgttacgacattttggaaagtcccgttgattttggtgccaaaacaaactcccattgacgtcaatggggtggagacttggaaatccccgtgagtcaaaccgctatccacgcccattgatgtactgccaaaaccgcatcaccatggtaatagcgatgactaatacgtagatgtactgccaagtaggaaagtcccataaggtcatgtactgggcataatgccaggcgggccatttaccgtcattgacgtcaatagggggcgtacttggcatatgatacacttgatgtactgccaagtgggcagtttaccgtaaatactccacccattgacgtcaatggaaagtccctattggcgttactatgggaacatacgtcattattgacgtcaatgggcgggggtcgttgggcggtcagccaggcgggccatttaccgtaagttatgtaacgcggaactccatatatgggctatgaactaatgaccccgtaattgattactattacagtgtagtcttatgcaatactcttgtagtcttgcaacatggtaacgatgagttagcaacatgccttacaaggagagaaaaagcaccgtgcatgccgattggtggaagtaaggtggtacgatcgtgccttattaggaaggcaacagacgggtctgacatggattggacgaaccactgaattgccgcattgcagagatattgtatttaagtgcctagctcgatacataaacaaactaccccaagctggccaccatgactacgtccggcgttccatttggcatgacactacgaccaacacgatctcggttgtctcggcgcactccgtacagtagggatcgtctacctccttttgagacagaaacccgcgctaccatactggaggatcatccgctgctgcccgaatgtaacactttgacaatgcacaacgtgagttacgtgcgaggtcttccctgcagtgtgggatttacgctgattcaggaatgggttgttccctgggatatggttctaacgcgggaggagcttgtaatcctgaggaagtgtatgcacgtgtgcctgtgttgtgccaacattgatatcatgacgagcatgatgatccatggttacgagtcctgggctctccactgtcattgttccagtcccggttccctgcagtgtatagccggcgggcaggttttggccagctggtttaggatggtggtggatggcgccatgtttaatcagaggtttatatggtaccgggaggtggtgaattacaacatgccaaaagaggtaatgtttatgtccagcgtgtttatgaggggtcgccacttaatctacctgcgcttgtggtatgatggccacgtgggttctgtggtccccgccatgagctttggatacagcgccttgcactgtgggattttgaacaatattgtggtgctgtgctgcagttactgtgctgatttaagtgagatcagggtgcgctgctgtgcccggaggacaaggcgccttatgctgcgggcggtgcgaatcatcgctgaggagaccactgccatgttgtattcctgcaggacggagcggcggcggcagcagtttattcgcgcgctgctgcagcaccaccgccctatcctgatgcacgattatgactctacccccatgtagaagcttggggatcaattctctagagctcgctgatcagcctcgactgtgccttctagttgccagccatctgttgtttgcccctcccccgtgccttccttgaccctggaaggtgccactcccactgtcctttcctaataaaatgaggaaattgcatcgcattgtctgagtaggtgtcattctattctggggggtggggtggggcaggacagcaagggggaggattgggaagacaatagcaggcatgctggggatgcggtgggctctatggcttctgaggcaaattgggcgtggcttaagggtgggaaagaatatataaggtgggggtcttatgtagttttgtatctgttttgcagcagccgccgccgccatgagcaccaactcgtttgatggaagcattgtgagctcatatttgacaacgcgcatgcccccatgggccggggtgcgtcagaatgtgatgggctccagcattgatggtcgccccgtcctgcccgcaaactctactaccttgacctacgagaccgtgtctggaacgccgttggagactgcagcctccgccgccgcttcagccgctgcagccaccgcccgcgggattgtgactgactttgctttcctgagcccgcttgcaagcagtgcagcttcccgttcatccgcccgcgatgacaagttgacggctcttttggcacaattggattctttgacccgggaacttaatgtcgtttctcagcagctgttggatctgcgccagcaggtttctgccctgaaggcttcctcccctcccaatgcggtttaaaacataaataaaaaaccagactctgtttggatttggatcaagcaagtgtcttgctgtctttatttaggggttttgcgcgcgcggtaggcccgggaccagcggtctcggtcgttgagggtcctgtgtattttttccaggacgtggtaaaggtgactctggatgttcagatacatgggcataagcccgtctctggggtggaggtagcaccactgcagagcttcatgctgcggggtggtgttgtagatgatccagtcgtagcaggagcgctgggcgtggtgcctaaaaatgtctttcagtagcaagctgattgccaggggcaggcccttggtgtaagtgtttacaaagcggttaagctgggatgggtgcatacgtggggatatgagatgcatcttggactgtatttttaggttggctatgttcccagccatatccctccggggattcatgttgtgcagaaccaccagcacagtgtatccggtgcacttgggaaatttgtcatgtagcttagaaggaaatgcgtggaagaacttggagacgcccttgtgacctccaagattttccatgcattcgtccataatgatggcaatgggcccacgggcggcggcctgggcgaagatatttctgggatcactaacgtcatagttgtgttccaggatgagatcgtcataggccatttttacaaagcgcgggcggagggtgccagactgcggtataatggttccatccggcccaggggcgtagttaccctcacagatttgcatttcccacgctttgagttcagatggggggatcatgtctacctgcggggcgatgaagaaaacggtttccggggtaggggagatcagctgggaagaaagcaggttcctgagcagctgcgacttaccgcagccggtgggcccgtaaatcacacctattaccggctgcaactggtagttaagagagctgcagctgccgtcatccctgagcaggggggccacttcgttaagcatgtccctgactcgcatgttttccctgaccaaatccgccagaaggcgctcgccgcccagcgatagcagttcttgcaaggaagcaaagtttttcaacggtttgagaccgtccgccgtaggcatgcttttgagcgtttgaccaagcagttccaggcggtcccacagctcggtcacctgctctacggcatctcgatccagcatatctcctcgtttcgcgggttggggcggctttcgctgtacggcagtagtcggtgctcgtccagacgggccagggtcatgtctttccacgggcgcagggtcctcgtcagcgtagtctgggtcacggtgaaggggtgcgctccgggctgcgcgctggccagggtgcgcttgaggctggtcctgctggtgctgaagcgctgccggtcttcgccctgcgcgtcggccaggtagcatttgaccatggtgtcatagtccagcccctccgcggcgtggcccttggcgcgcagcttgcccttggaggaggcgccgcacgaggggcagtgcagacttttgagggcgtagagcttgggcgcgagaaataccgattccggggagtaggcatccgcgccgcaggccccgcagacggtctcgcattccacgagccaggtgagctctggccgttcggggtcaaaaaccaggtttcccccatgctttttgatgcgtttcttacctctggtttccatgagccggtgtccacgctcggtgacgaaaaggctgtccgtgtccccgtatacagacttgagaggcctgtcctcgagcggtgttccgcggtcctcctcgtatagaaactcggaccactctgagacaaaggctcgcgtccaggccagcacgaaggaggctaagtgggaggggtagcggtcgttgtccactagggggtccactcgctccagggtgtgaagacacatgtcgccctcttcggcatcaaggaaggtgattggtttgtaggtgtaggccacgtgaccgggtgttcctgaaggggggctataaaagggggtgggggcgcgttcgtcctcactctcttccgcatcgctgtctgcgagggccagctgttggggtgagtactccctctgaaaagcgggcatgacttctgcgctaagattgtcagtttccaaaaacgaggaggatttgatattcacctggcccgcggtgatgcctttgagggtggccgcatccatctggtcagaaaagacaatctttttgttgtcaagcttggtggcaaacgacccgtagagggcgttggacagcaacttggcgatggagcgcagggtttggtttttgtcgcgatcggcgcgctccttggccgcgatgtttagctgcacgtattcgcgcgcaacgcaccgccattcgggaaagacggtggtgcgctcgtcgggcaccaggtgcacgcgccaaccgcggttgtgcagggtgacaaggtcaacgctggtggctacctctccgcgtaggcgctcgttggtccagcagaggcggccgcccttgcgcgagcagaatggcggtagggggtctagctgcgtctcgtccggggggtctgcgtccacggtaaagaccccgggcagcaggcgcgcgtcgaagtagtctatcttgcatccttgcaagtctagcgcctgctgccatgcgcgggcggcaagcgcgcgctcgtatgggttgagtgggggaccccatggcatggggtgggtgagcgcggaggcgtacatgccgcaaatgtcgtaaacgtagaggggctctctgagtattccaagatatgtagggtagcatcttccaccgcggatgctggcgcgcacgtaatcgtatagttcgtgcgagggagcgaggaggtcgggaccgaggttgctacgggcgggctgctctgctcggaagactatctgcctgaagatggcatgtgagttggatgatatggttggacgctggaagacgttgaagctggcgtctgtgagacctaccgcgtcacgcacgaaggaggcgtaggagtcgcgcagcttgttgaccagctcggcggtgacctgcacgtctagggcgcagtagtccagggtttccttgatgatgtcatacttatcctgtcccttttttttccacagctcgcggttgaggacaaactcttcgcggtctttccagtactcttggatcggaaacccgtcggcctccgaacggtaagagcctagcatgtagaactggttgacggcctggtaggcgcagcatcccttttctacgggtagcgcgtatgcctgcgcggccttccggagcgaggtgtgggtgagcgcaaaggtgtccctgaccatgactttgaggtactggtatttgaagtcagtgtcgtcgcatccgccctgctcccagagcaaaaagtccgtgcgctttttggaacgcggatttggcagggcgaaggtgacatcgttgaagagtatctttcccgcgcgaggcataaagttgcgtgtgatgcggaagggtcccggcacctcggaacggttgttaattacctgggcggcgagcacgatctcgtcaaagccgttgatgttgtggcccacaatgtaaagttccaagaagcgcgggatgcccttgatggaaggcaattttttaagttcctcgtaggtgagctcttcaggggagctgagcccgtgctctgaaagggcccagtctgcaagatgagggttggaagcgacgaatgagctccacaggtcacgggccattagcatttgcaggtggtcgcgaaaggtcctaaactggcgacctatggccattttttctggggtgatgcagtagaaggtaagcgggtcttgttcccagcggtcccatccaaggttcgcggctaggtctcgcgcggcagtcactagaggctcatctccgccgaacttcatgaccagcatgaagggcacgagctgcttcccaaaggcccccatccaagtataggtctctacatcgtaggtgacaaagagacgctcggtgcgaggatgcgagccgatcgggaagaactggatctcccgccaccaattggaggagtggctattgatgtggtgaaagtagaagtccctgcgacgggccgaacactcgtgctggcttttgtaaaaacgtgcgcagtactggcagcggtgcacgggctgtacatcctgcacgaggttgacctgacgaccgcgcacaaggaagcagagtgggaatttgagcccctcgcctggcgggtttggctggtggtcttctacttcggctgcttgtccttgaccgtctggctgctcgaggggagttacggtggatcggaccaccacgccgcgcgagcccaaagtccagatgtccgcgcgcggcggtcggagcttgatgacaacatcgcgcagatgggagctgtccatggtctggagctcccgcggcgtcaggtcaggcgggagctcctgcaggtttacctcgcatagacgggtcagggcgcgggctagatccaggtgatacctaatttccaggggctggttggtggcggcgtcgatggcttgcaagaggccgcatccccgcggcgcgactacggtaccgcgcggcgggcggtgggccgcgggggtgtccttggatgatgcatctaaaagcggtgacgcgggcgagcccccggaggtagggggggctccggacccgccgggagagggggcaggggcacgtcggcgccgcgcgcgggcaggagctggtgctgcgcgcgtaggttgctggcgaacgcgacgacgcggcggttgatctcctgaatctggcgcctctgcgtgaagacgacgggcccggtgagcttgaacctgaaagagagttcgacagaatcaatttcggtgtcgttgacggcggcctggcgcaaaatctcctgcacgtctcctgagttgtcttgataggcgatctcggccatgaactgctcgatctcttcctcctggagatctccgcgtccggctcgctccacggtggcggcgaggtcgttggaaatgcgggccatgagctgcgagaaggcgttgaggcctccctcgttccagacgcggctgtagaccacgcccccttcggcatcgcgggcgcgcatgaccacctgcgcgagattgagctccacgtgccgggcgaagacggcgtagtttcgcaggcgctgaaagaggtagttgagggtggtggcggtgtgttctgccacgaagaagtacataacccagcgtcgcaacgtggattcgttgatatcccccaaggcctcaaggcgctccatggcctcgtagaagtccacggcgaagttgaaaaactgggagttgcgcgccgacacggttaactcctcctccagaagacggatgagctcggcgacagtgtcgcgcacctcgcgctcaaaggctacaggggcctcttcttcttcttcaatctcctcttccataagggcctccccttcttcttcttctggcggcggtgggggaggggggacacggcggcgacgacggcgcaccgggaggcggtcgacaaagcgctcgatcatctccccgcggcgacggcgcatggtctcggtgacggcgcggccgttctcgcgggggcgcagttggaagacgccgcccgtcatgtcccggttatgggttggcggggggctgccatgcggcagggatacggcgctaacgatgcatctcaacaattgttgtgtaggtactccgccgccgagggacctgagcgagtccgcatcgaccggatcggaaaacctctcgagaaaggcgtctaaccagtcacagtcgcaaggtaggctgagcaccgtggcgggcggcagcgggcggcggtcggggttgtttctggcggaggtgctgctgatgatgtaattaaagtaggcggtcttgagacggcggatggtcgacagaagcaccatgtccttgggtccggcctgctgaatgcgcaggcggtcggccatgccccaggcttcgttttgacatcggcgcaggtctttgtagtagtcttgcatgagcctttctaccggcacttcttcttctccttcctcttgtcctgcatctcttgcatctatcgctgcggcggcggcggagtttggccgtaggtggcgccctcttcctcccatgcgtgtgaccccgaagcccctcatcggctgaagcagggctaggtcggcgacaacgcgctcggctaatatggcctgctgcacctgcgtgagggtagactggaagtcatccatgtccacaaagcggtggtatgcgcccgtgttgatggtgtaagtgcagttggccataacggaccagttaacggtctggtgacccggctgcgagagctcggtgtacctgagacgcgagtaagccctcgagtcaaatacgtagtcgttgcaagtccgcaccaggtactggtatcccaccaaaaagtgcggcggcggctggcggtagaggggccagcgtagggtggccggggctccgggggcgagatcttccaacataaggcgatgatatccgtagatgtacctggacatccaggtgatgccggcggcggtggtggaggcgcgcggaaagtcgcggacgcggttccagatgttgcgcagcggcaaaaagtgctccatggtcgggacgctctggccggtcaggcgcgcgcaatcgttgacgctctagcgtgcaaaaggagagcctgtaagcgggcactcttccgtggtctggtggataaattcgcaagggtatcatggcggacgaccggggttcgagccccgtatccggccgtccgccgtgatccatgcggttaccgcccgcgtgtcgaacccaggtgtgcgacgtcagacaacgggggagtgctccttttggcttccttccaggcgcggcggctgctgcgctagcttttttggccactggccgcgcgcagcgtaagcggttaggctggaaagcgaaagcattaagtggctcgctccctgtagccggagggttattttccaagggttgagtcgcgggacccccggttcgagtctcggaccggccggactgcggcgaacgggggtttgcctccccgtcatgcaagaccccgcttgcaaattcctccggaaacagggacgagccccttttttgcttttcccagatgcatccggtgctgcggcagatgcgcccccctcctcagcagcggcaagagcaagagcagcggcagacatgcagggcaccctcccctcctcctaccgcgtcaggaggggcgacatccgcggttgacgcggcagcagatggtgattacgaacccccgcggcgccgggcccggcactacctggacttggaggagggcgagggcctggcgcggctaggagcgccctctcctgagcggcacccaagggtgcagctgaagcgtgatacgcgtgaggcgtacgtgccgcggcagaacctgtttcgcgaccgcgagggagaggagcccgaggagatgcgggatcgaaagttccacgcagggcgcgagctgcggcatggcctgaatcgcgagcggttgctgcgcgaggaggactttgagcccgacgcgcgaaccgggattagtcccgcgcgcgcacacgtggcggccgccgacctggtaaccgcatacgagcagacggtgaaccaggagattaactttcaaaaaagctttaacaaccacgtgcgtacgcttgtggcgcgcgaggaggtggctataggactgatgcatctgtgggactttgtaagcgcgctggagcaaaacccaaatagcaagccgctcatggcgcagctgttccttatagtgcagcacagcagggacaacgaggcattcagggatgcgctgctaaacatagtagagcccgagggccgctggctgctcgatttgataaacatcctgcagagcatagtggtgcaggagcgcagcttgagcctggctgacaaggtggccgccatcaactattccatgcttagcctgggcaagttttacgcccgcaagatataccataccccttacgttcccatagacaaggaggtaaagatcgaggggttctacatgcgcatggcgctgaaggtgcttaccttgagcgacgacctgggcgtttatcgcaacgagcgcatccacaaggccgtgagcgtgagccggcggcgcgagctcagcgaccgcgagctgatgcacagcctgcaaagggccctggctggcacgggcagcggcgatagagaggccgagtcctactttgacgcgggcgctgacctgcgctgggccccaagccgacgcgccctggaggcagctggggccggacctgggctggcggtggcacccgcgcgcgctggcaacgtcggcggcgtggaggaatatgacgaggacgatgagtacgagccagaggacggcgagtactaagcggtgatgtttctgatcagatgatgcaagacgcaacggacccggcggtgcgggcggcgctgcagagccagccgtccggccttaactccacggacgactggcgccaggtcatggaccgcatcatgtcgctgactgcgcgcaatcctgacgcgttccggcagcagccgcaggccaaccggctctccgcaattctggaagcggtggtcccggcgcgcgcaaaccccacgcacgagaaggtgctggcgatcgtaaacgcgctggccgaaaacagggccatccggcccgacgaggccggcctggtctacgacgcgctgcttcagcgcgtggctcgttacaacagcggcaacgtgcagaccaacctggaccggctggtgggggatgtgcgcgaggccgtggcgcagcgtgagcgcgcgcagcagcagggcaacctgggctccatggttgcactaaacgccttcctgagtacacagcccgccaacgtgccgcggggacaggaggactacaccaactttgtgagcgcactgcggctaatggtgactgagacaccgcaaagtgaggtgtaccagtctgggccagactattttttccagaccagtagacaaggcctgcagaccgtaaacctgagccaggctttcaaaaacttgcaggggctgtggggggtgcgggctcccacaggcgaccgcgcgaccgtgtctagcttgctgacgcccaactcgcgcctgttgctgctgctaatagcgcccttcacggacagtggcagcgtgtcccgggacacatacctaggtcacttgctgacactgtaccgcgaggccataggtcaggcgcatgtggacgagcatactttccaggagattacaagtgtcagccgcgcgctggggcaggaggacacgggcagcctggaggcaaccctaaactacctgctgaccaaccggcggcagaagatcccctcgttgcacagtttaaacagcgaggaggagcgcattttgcgctacgtgcagcagagcgtgagccttaacctgatgcgcgacggggtaacgcccagcgtggcgctggacatgaccgcgcgcaacatggaaccgggcatgtatgcctcaaaccggccgtttatcaaccgcctaatggactacttgcatcgcgcggccgccgtgaaccccgagtatttcaccaatgccatcttgaacccgcactggctaccgccccctggtttctacaccgggggattcgaggtgcccgagggtaacgatggattcctctgggacgacatagacgacagcgtgttttccccgcaaccgcagaccctgctagagttgcaacagcgcgagcaggcagaggcggcgctgcgaaaggaaagcttccgcaggccaagcagcttgtccgatctaggcgctgcggccccgcggtcagatgctagtagcccatttccaagcttgatagggtctcttaccagcactcgcaccacccgcccgcgcctgctgggcgaggaggagtacctaaacaactcgctgctgcagccgcagcgcgaaaaaaacctgcctccggcatttcccaacaacgggatagagagcctagtggacaagatgagtagatggaagacgtacgcgcaggagcacagggacgtgccaggcccgcgcccgcccacccgtcgtcaaaggcacgaccgtcagcggggtctggtgtgggaggacgatgactcggcagacgacagcagcgtcctggatttgggagggagtggcaacccgtttgcgcaccttcgccccaggctggggagaatgttttaaaaaaaaaaaagcatgatgcaaaataaaaaactcaccaaggccatggcaccgagcgttggttttcttgtattccccttagtatgcggcgcgcggcgatgtatgaggaaggtcctcctccctcctacgagagtgtggtgagcgcggcgccagtggcggcggcgctgggttctcccttcgatgctcccctggacccgccgtttgtgcctccgcggtacctgcggcctaccggggggagaaacagcatccgttactctgagttggcacccctattcgacaccacccgtgtgtacctggtggacaacaagtcaacggatgtggcatccctgaactaccagaacgaccacagcaactttctgaccacggtcattcaaaacaatgactacagcccgggggaggcaagcacacagaccatcaatcttgacgaccggtcgcactggggcggcgacctgaaaaccatcctgcataccaacatgccaaatgtgaacgagttcatgtttaccaataagtttaaggcgcgggtgatggtgtcgcgcttgcctactaaggacaatcaggtggagctgaaatacgagtgggtggagttcacgctgcccgagggcaactactccgagaccatgaccatagaccttatgaacaacgcgatcgtggagcactacttgaaagtgggcagacagaacggggttctggaaagcgacatcggggtaaagtttgacacccgcaacttcagactggggtttgaccccgtcactggtcttgtcatgcctggggtatatacaaacgaagccttccatccagacatcattttgctgccaggatgcggggtggacttcacccacagccgcctgagcaacttgttgggcatccgcaagcggcaacccttccaggagggctttaggatcacctacgatgatctggagggtggtaacattcccgcactgttggatgtggacgcctaccaggcgagcttgaaagatgacaccgaacagggcgggggtggcgcaggcggcagcaacagcagtggcagcggcgcggaagagaactccaacgcggcagccgcggcaatgcagccggtggaggacatgaacgatcatgccattcgcggcgacacctttgccacacgggctgaggagaagcgcgctgaggccgaagcagcggccgaagctgccgcccccgctgcgcaacccgaggtcgagaagcctcagaagaaaccggtgatcaaacccctgacagaggacagcaagaaacgcagttacaacctaataagcaatgacagcaccttcacccagtaccgcagctggtaccttgcatacaactacggcgaccctcagaccggaatccgctcatggaccctgctttgcactcctgacgtaacctgcggctcggagcaggtctactggtcgttgccagacatgatgcaagaccccgtgaccttccgctccacgcgccagatcagcaactttccggtggtgggcgccgagctgttgcccgtgcactccaagagcttctacaacgaccaggccgtctactcccaactcatccgccagtttacctctctgacccacgtgttcaatcgctttcccgagaaccagattttggcgcgcccgccagcccccaccatcaccaccgtcagtgaaaacgttcctgctctcacagatcacgggacgctaccgctgcgcaacagcatcggaggagtccagcgagtgaccattactgacgccagacgccgcacctgcccctacgtttacaaggccctgggcatagtctcgccgcgcgtcctatcgagccgcactttttgagcaagcatgtccatccttatatcgcccagcaataacacaggctggggcctgcgcttcccaagcaagatgtttggcggggccaagaagcgctccgaccaacacccagtgcgcgtgcgcgggcactaccgcgcgccctggggcgcgcacaaacgcggccgcactgggcgcaccaccgtcgatgacgccatcgacgcggtggtggaggaggcgcgcaactacacgcccacgccgccaccagtgtccacagtggacgcggccattcagaccgtggtgcgcggagcccggcgctatgctaaaatgaagagacggcggaggcgcgtagcacgtcgccaccgccgccgacccggcactgccgcccaacgcgcggcggcggccctgcttaaccgcgcacgtcgcaccggccgacgggcggccatgcgggccgctcgaaggctggccgcgggtattgtcactgtgccccccaggtccaggcgacgagcggccgccgcagcagccgcggccattagtgctatgactcagggtcgcaggggcaacgtgtattgggtgcgcgactcggttagcggcctgcgcgtgcccgtgcgcacccgccccccgcgcaactagattgcaagaaaaaactacttagactcgtactgttgtatgtatccagcggcggcggcgcgcaacgaagctatgtccaagcgcaaaatcaaagaagagatgctccaggtcatcgcgccggagatctatggccccccgaagaaggaagagcaggattacaagccccgaaagctaaagcgggtcaaaaagaaaaagaaagatgatgatgatgaacttgacgacgaggtggaactgctgcacgctaccgcgcccaggcgacgggtacagtggaaaggtcgacgcgtaaaacgtgttttgcgacccggcaccaccgtagtctttacgcccggtgagcgctccacccgcacctacaagcgcgtgtatgatgaggtgtacggcgacgaggacctgcttgagcaggccaacgagcgcctcggggagtttgcctacggaaagcggcataaggacatgctggcgttgccgctggacgagggcaacccaacacctagcctaaagcccgtaacactgcagcaggtgctgcccgcgcttgcaccgtccgaagaaaagcgcggcctaaagcgcgagtctggtgacttggcacccaccgtgcagctgatggtacccaagcgccagcgactggaagatgtcttggaaaaaatgaccgtggaacctgggctggagcccgaggtccgcgtgcggccaatcaagcaggtggcgccgggactgggcgtgcagaccgtggacgttcagatacccactaccagtagcaccagtattgccaccgccacagagggcatggagacacaaacgtccccggttgcctcagcggtggcggatgccgcggtgcaggcggtcgctgcggccgcgtccaagacctctacggaggtgcaaacggacccgtggatgtttcgcgtttcagccccccggcgcccgcgccgttcgaggaagtacggcgccgccagcgcgctactgcccgaatatgccctacatccttccattgcgcctacccccggctatcgtggctacacctaccgccccagaagacgagcaactacccgacgccgaaccaccactggaacccgccgccgccgtcgccgtcgccagcccgtgctggccccgatttccgtgcgcagggtggctcgcgaaggaggcaggaccctggtgctgccaacagcgcgctaccaccccagcatcgtttaaaagccggtctttgtggttcttgcagatatggccctcacctgccgcctccgtttcccggtgccgggattccgaggaagaatgcaccgtaggaggggcatggccggccacggcctgacgggcggcatgcgtcgtgcgcaccaccggcggcggcgcgcgtcgcaccgtcgcatgcgcggcggtatcctgcccctccttattccactgatcgccgcggcgattggcgccgtgcccggaattgcatccgtggccttgcaggcgcagagacactgattaaaaacaagttgcatgtggaaaaatcaaaataaaaagtctggactctcacgctcgcttggtcctgtaactattttgtagaatggaagacatcaactttgcgtctctggccccgcgacacggctcgcgcccgttcatgggaaactggcaagatatcggcaccagcaatatgagcggtggcgccttcagctggggctcgctgtggagcggcattaaaaatttcggttccaccgttaagaactatggcagcaaggcctggaacagcagcacaggccagatgctgagggataagttgaaagagcaaaatttccaacaaaaggtggtagatggcctggcctctggcattagcggggtggtggacctggccaaccaggcagtgcaaaataagattaacagtaagcttgatccccgccctcccgtagaggagcctccaccggccgtggagacagtgtctccagaggggcgtggcgaaaagcgtccgcgccccgacagggaagaaactctggtgacgcaaatagacgagcctccctcgtacgaggaggcactaaagcaaggcctgcccaccacccgtcccatcgcgcccatggctaccggagtgctgggccagcacacacccgtaacgctggacctgcctccccccgccgacacccagcagaaacctgtgctgccaggcccgaccgccgttgttgtaacccgtcctagccgcgcgtccctgcgccgcgccgccagcggtccgcgatcgttgcggcccgtagccagtggcaactggcaaagcacactgaacagcatcgtgggtctgggggtgcaatccctgaagcgccgacgatgcttctgatagctaacgtgtcgtatgtgtgtcatgtatgcgtccatgtcgccgccagaggagctgctgagccgccgcgcgcccgctttccaagatggctaccccttcgatgatgccgcagtggtcttacatgcacatctcgggccaggacgcctcggagtacctgagccccgggctggtgcagtttgcccgcgccaccgagacgtacttcagcctgaataacaagtttagaaaccccacggtggcgcctacgcacgacgtgaccacagaccggtcccagcgtttgacgctgcggttcatccctgtggaccgtgaggatactgcgtactcgtacaaggcgcggttcaccctagctgtgggtgataaccgtgtgctggacatggcttccacgtactttgacatccgcggcgtgctggacaggggccctacttttaagccctactctggcactgcctacaacgccctggctcccaagggtgccccaaatccttgcgaatgggatgaagctgctactgctcttgaaataaacctagaagaagaggacgatgacaacgaagacgaagtagacgagcaagctgagcagcaaaaaactcacgtatttgggcaggcgccttattctggtataaatattacaaaggagggtattcaaataggtgtcgaaggtcaaacacctaaatatgccgataaaacatttcaacctgaacctcaaataggagaatctcagtggtacgaaacagaaattaatcatgcagctgggagagtcctaaaaaagactaccccaatgaaaccatgttacggttcatatgcaaaacccacaaatgaaaatggagggcaaggcattcttgtaaagcaacaaaatggaaagctagaaagtcaagtggaaatgcaatttttctcaactactgaggcagccgcaggcaatggtgataacttgactcctaaagtggtattgtacagtgaagatgtagatatagaaaccccagacactcatatttcttacatgcccactattaaggaaggtaactcacgagaactaatgggccaacaatctatgcccaacaggcctaattacattgcttttagggacaattttattggtctaatgtattacaacagcacgggtaatatgggtgttctggcgggccaagcatcgcagttgaatgctgttgtagatttgcaagacagaaacacagagctttcataccagcttttgcttgattccattggtgatagaaccaggtacttttctatgtggaatcaggctgttgacagctatgatccagatgttagaattattgaaaatcatggaactgaagatgaacttccaaattactgctttccactgggaggtgtgattaatacagagactcttaccaaggtaaaacctaaaacaggtcaggaaaatggatgggaaaaagatgctacagaattttcagataaaaatgaaataagagttggaaataattttgccatggaaatcaatctaaatgccaacctgtggagaaatttcctgtactccaacatagcgctgtatttgcccgacaagctaaagtacagtccttccaacgtaaaaatttctgataacccaaacacctacgactacatgaacaagcgagtggtggctcccgggctagtggactgctacattaaccttggagcacgctggtcccttgactatatggacaacgtcaacccatttaaccaccaccgcaatgctggcctgcgctaccgctcaatgttgctgggcaatggtcgctatgtgcccttccacatccaggtgcctcagaagttctttgccattaaaaacctccttctcctgccgggctcatacacctacgagtggaacttcaggaaggatgttaacatggttctgcagagctccctaggaaatgacctaagggttgacggagccagcattaagtttgatagcatttgcctttacgccaccttcttccccatggcccacaacaccgcctccacgcttgaggccatgcttagaaacgacaccaacgaccagtcctttaacgactatctctccgccgccaacatgctctaccctatacccgccaacgctaccaacgtgcccatatccatcccctcccgcaactgggcggctttccgcggctgggccttcacgcgccttaagactaaggaaaccccatcactgggctcgggctacgacccttattacacctactctggctctataccctacctagatggaaccttttacctcaaccacacctttaagaaggtggccattacctttgactcttctgtcagctggcctggcaatgaccgcctgcttacccccaacgagtttgaaattaagcgctcagttgacggggagggttacaacgttgcccagtgtaacatgaccaaagactggttcctggtacaaatgctagctaactataacattggctaccagggcttctatatcccagagagctacaaggaccgcatgtactccttctttagaaacttccagcccatgagccgtcaggtggtggatgatactaaatacaaggactaccaacaggtgggcatcctacaccaacacaacaactctggatttgttggctaccttgcccccaccatgcgcgaaggacaggcctaccctgctaacttcccctatccgcttataggcaagaccgcagttgacagcattacccagaaaaagtttctttgcgatcgcaccctttggcgcatcccattctccagtaactttatgtccatgggcgcactcacagacctgggccaaaaccttctctacgccaactccgcccacgcgctagacatgacttttgaggtggatcccatggacgagcccacccttctttatgttttgtttgaagtctttgacgtggtccgtgtgcaccagccgcaccgcggcgtcatcgaaaccgtgtacctgcgcacgcccttctcggccggcaacgccacaacataaagaagcaagcaacatcaacaacagctgccgccatgggctccagtgagcaggaactgaaagccattgtcaaagatcttggttgtgggccatattttttgggcacctatgacaagcgctttccaggctttgtttctccacacaagctcgcctgcgccatagtcaatacggccggtcgcgagactgggggcgtacactggatggcctttgcctggaacccgcactcaaaaacatgctacctctttgagccctttggcttttctgaccagcgactcaagcaggtttaccagtttgagtacgagtcactcctgcgccgtagcgccattgcttcttcccccgaccgctgtataacgctggaaaagtccacccaaagcgtacaggggcccaactcggccgcctgtggactattctgctgcatgtttctccacgcctttgccaactggccccaaactcccatggatcacaaccccaccatgaaccttattaccggggtacccaactccatgctcaacagtccccaggtacagcccaccctgcgtcgcaaccaggaacagctctacagcttcctggagcgccactcgccctacttccgcagccacagtgcgcagattaggagcgccacttctttttgtcacttgaaaaacatgtaaaaataatgtactagagacactttcaataaaggcaaatgcttttatttgtacactctcgggtgattatttacccccacccttgccgtctgcgccgtttaaaaatcaaaggggttctgccgcgcatcgctatgcgccactggcagggacacgttgcgatactggtgtttagtgctccacttaaactcaggcacaaccatccgcggcagctcggtgaagttttcactccacaggctgcgcaccatcaccaacgcgtttagcaggtcgggcgccgatatcttgaagtcgcagttggggcctccgccctgcgcgcgcgagttgcgatacacagggttgcagcactggaacactatcagcgccgggtggtgcacgctggccagcacgctcttgtcggagatcagatccgcgtccaggtcctccgcgttgctcagggcgaacggagtcaactttggtagctgccttcccaaaaagggcgcgtgcccaggctttgagttgcactcgcaccgtagtggcatcaaaaggtgaccgtgcccggtctgggcgttaggatacagcgcctgcataaaagccttgatctgcttaaaagccacctgagcctttgcgccttcagagaagaacatgccgcaagacttgccggaaaactgattggccggacaggccgcgtcgtgcacgcagcaccttgcgtcggtgttggagatctgcaccacatttcggccccaccggttcttcacgatcttggccttgctagactgctccttcagcgcgcgctgcccgttttcgctcgtcacatccatttcaatcacgtgctccttatttatcataatgcttccgtgtagacacttaagctcgccttcgatctcagcgcagcggtgcagccacaacgcgcagcccgtgggctcgtgatgcttgtaggtcacctctgcaaacgactgcaggtacgcctgcaggaatcgccccatcatcgtcacaaaggtcttgttgctggtgaaggtcagctgcaacccgcggtgctcctcgttcagccaggtcttgcatacggccgccagagcttccacttggtcaggcagtagtttgaagttcgcctttagatcgttatccacgtggtacttgtccatcagcgcgcgcgcagcctccatgcccttctcccacgcagacacgatcggcacactcagcgggttcatcaccgtaatttcactttccgcttcgctgggctcttcctcttcctcttgcgtccgcataccacgcgccactgggtcgtcttcattcagccgccgcactgtgcgcttacctcctttgccatgcttgattagcaccggtgggttgctgaaacccaccatttgtagcgccacatcttctctttcttcctcgctgtccacgattacctctggtgatggcgggcgctcgggcttgggagaagggcgcttctttttcttcttgggcgcaatggccaaatccgccgccgaggtcgatggccgcgggctgggtgtgcgcggcaccagcgcgtcttgtgatgagtcttcctcgtcctcggactcgatacgccgcctcatccgcttttttgggggcgcccggggaggcggcggcgacggggacggggacgacacgtcctccatggttgggggacgtcgcgccgcaccgcgtccgcgctcgggggtggtttcgcgctgctcctcttcccgactggccatttccttctcctataggcagaaaaagatcatggagtcagtcgagaagaaggacagcctaaccgccccctctgagttcgccaccaccgcctccaccgatgccgccaacgcgcctaccaccttccccgtcgaggcacccccgcttgaggaggaggaagtgattatcgagcaggacccaggttttgtaagcgaagacgacgaggaccgctcagtaccaacagaggataaaaagcaagaccaggacaacgcagaggcaaacgaggaacaagtcgggcggggggacgaaaggcatggcgactacctagatgtgggagacgacgtgctgttgaagcatctgcagcgccagtgcgccattatctgcgacgcgttgcaagagcgcagcgatgtgcccctcgccatagcggatgtcagccttgcctacgaacgccacctattctcaccgcgcgtaccccccaaacgccaagaaaacggcacatgcgagcccaacccgcgcctcaacttctaccccgtatttgccgtgccagaggtgcttgccacctatcacatctttttccaaaactgcaagatacccctatcctgccgtgccaaccgcagccgagcggacaagcagctggccttgcggcagggcgctgtcatacctgatatcgcctcgctcaacgaagtgccaaaaatctttgagggtcttggacgcgacgagaagcgcgcggcaaacgctctgcaacaggaaaacagcgaaaatgaaagtcactctggagtgttggtggaactcgagggtgacaacgcgcgcctagccgtactaaaacgcagcatcgaggtcacccactttgcctacccggcacttaacctaccccccaaggtcatgagcacagtcatgagtgagctgatcgtgcgccgtgcgcagcccctggagagggatgcaaatttgcaagaacaaacagaggagggcctacccgcagttggcgacgagcagctagcgcgctggcttcaaacgcgcgagcctgccgacttggaggagcgacgcaaactaatgatggccgcagtgctcgttaccgtggagcttgagtgcatgcagcggttctttgctgacccggagatgcagcgcaagctagaggaaacattgcactacacctttcgacagggctacgtacgccaggcctgcaagatctccaacgtggagctctgcaacctggtctcctaccttggaattttgcacgaaaaccgccttgggcaaaacgtgcttcattccacgctcaagggcgaggcgcgccgcgactacgtccgcgactgcgtttacttatttctatgctacacctggcagacggccatgggcgtttggcagcagtgcttggaggagtgcaacctcaaggagctgcagaaactgctaaagcaaaacttgaaggacctatggacggccttcaacgagcgctccgtggccgcgcacctggcggacatcattttccccgaacgcctgcttaaaaccctgcaacagggtctgccagacttcaccagtcaaagcatgttgcagaactttaggaactttatcctagagcgctcaggaatcttgcccgccacctgctgtgcacttcctagcgactttgtgcccattaagtaccgcgaatgccctccgccgctttggggccactgctaccttctgcagctagccaactaccttgcctaccactctgacataatggaagacgtgagcggtgacggtctactggagtgtcactgtcgctgcaacctatgcaccccgcaccgctccctggtttgcaattcgcagctgcttaacgaaagtcaaattatcggtacctttgagctgcagggtccctcgcctgacgaaaagtccgcggctccggggttgaaactcactccggggctgtggacgtcggcttaccttcgcaaatttgtacctgaggactaccacgcccacgagattaggttctacgaagaccaatcccgcccgcctaatgcggagcttaccgcctgcgtcattacccagggccacattcttggccaattgcaagccatcaacaaagcccgccaagagtttctgctacgaaagggacggggggtttacttggacccccagtccggcgaggagctcaacccaatccccccgccgccgcagccctatcagcagcagccgcgggcccttgcttcccaggatggcacccaaaaagaagctgcagctgccgccgccacccacggacgaggaggaatactgggacagtcaggcagaggaggttttggacgaggaggaggaggacatgatggaagactgggagagcctagacgaggaagcttccgaggtcgaagaggtgtcagacgaaacaccgtcaccctcggtcgcattcccctcgccggcgccccagaaatcggcaaccggttccagcatggctacaacctccgctcctcaggcgccgccggcactgcccgttcgccgacccaaccgtagatgggacaccactggaaccagggccggtaagtccaagcagccgccgccgttagcccaagagcaacaacagcgccaaggctaccgctcatggcgcgggcacaagaacgccatagttgcttgcttgcaagactgtgggggcaacatctccttcgcccgccgctttcttctctaccatcacggcgtggccttcccccgtaacatcctgcattactaccgtcatctctacagcccatactgcaccggcggcagcggcagcaacagcagcggccacacagaagcaaaggcgaccggatagcaagactctgacaaagcccaagaaatccacagcggcggcagcagcaggaggaggagcgctgcgtctggcgcccaacgaacccgtatcgacccgcgagcttagaaacaggatttttcccactctgtatgctatatttcaacagagcaggggccaagaacaagagctgaaaataaaaaacaggtctctgcgatccctcacccgcagctgcctgtatcacaaaagcgaagatcagcttcggcgcacgctggaagacgcggaggctctcttcagtaaatactgcgcgctgactcttaaggactagtttcgcgccctttctcaaatttaagcgcgaaaactacgtcatctccagcggccacacccggcgccagcacctgttgtcagcgccattatgagcaaggaaattcccacgccctacatgtggagttaccagccacaaatgggacttgcggctggagctgcccaagactactcaacccgaataaactacatgagcgcgggaccccacatgatatcccgggtcaacggaatacgcgcccaccgaaaccgaattctcctggaacaggcggctattaccaccacacctcgtaataaccttaatccccgtagttggcccgctgccctggtgtaccaggaaagtcccgctcccaccactgtggtacttcccagagacgcccaggccgaagttcagatgactaactcaggggcgcagcttgcgggcggctttcgtcacagggtgcggtcgcccgggcagggtataactcacctgacaatcagagggcgaggtattcagctcaacgacgagtcggtgagctcctcgcttggtctccgtccggacgggacatttcagatcggcggcgccggccgctcttcattcacgcctcgtcaggcaatcctaactctgcagacctcgtcctctgagccgcgctctggaggcattggaactctgcaatttattgaggagtttgtgccatcggtctactttaaccccttctcgggacctcccggccactatccggatcaatttattcctaactttgacgcggtaaaggactcggcggacggctacgactgaatgttaagtggagaggcagagcaactgcgcctgaaacacctggtccactgtcgccgccacaagtgctttgcccgcgactccggtgagttttgctactttgaattgcccgaggatcatatcgagggcccggcgcacggcgtccggcttaccgcccagggagagcttgcccgtagcctgattcgggagtttacccagcgccccctgctagttgagcgggacaggggaccctgtgttctcactgtgatttgcaactgtcctaaccctggattacatcaagatcctctagttaatgtcaggtcgcctaagtcgattaactagagtacccggggatcttattccctttaactaataaaaaaaaataataaagcatcacttacttaaaatcagttagcaaatttctgtccagtttattcagcagcacctccttgccctcctcccagctctggtattgcagcttcctcctggctgcaaactttctccacaatctaaatggaatgtcagtttcctcctgttcctgtccatccgcacccactatcttcatgttgttgcagatgaagcgcgcaagaccgtctgaagataccttcaaccccgtgtatccatatgacacggaaaccggtcctccaactgtgccttttcttactcctccctttgtatcccccaatgggtttcaagagagtccccctggggtactctctttgcgcctatccgaacctctagttacctccaatggcatgcttgcgctcaaaatgggcaacggcctctctctggacgaggccggcaaccttacctcccaaaatgtaaccactgtgagcccacctctcaaaaaaaccaagtcaaacataaacctggaaatatctgcacccctcacagttacctcagaagccctaactgtggctgccgccgcacctctaatggtcgcgggcaacacactcaccatgcaatcacaggccccgctaaccgtgcacgactccaaacttagcattgccacccaaggacccctcacagtgtcagaaggaaagctagccctgcaaacatcaggccccctcaccaccaccgatagcagtacccttactatcactgcctcaccccctctaactactgccactggtagcttgggcattgacttgaaagagcccatttatacacaaaatggaaaactaggactaaagtacggggctcctttgcatgtaacagacgacctaaacactttgaccgtagcaactggtccaggtgtgactattaataatacttccttgcaaactaaagttactggagccttgggttttgattcacaaggcaatatgcaacttaatgtagcaggaggactaaggattgattctcaaaacagacgccttatacttgatgttagttatccgtttgatgctcaaaaccaactaaatctaagactaggacagggccctctttttataaactcagcccacaacttggatattaactacaacaaaggcctttacttgtttacagcttcaaacaattccaaaaagcttgaggttaacctaagcactgccaaggggttgatgtttgacgctacagccatagccattaatgcaggagatgggcttgaatttggttcacctaatgcaccaaacacaaatcccctcaaaacaaaaattggccatggcctagaatttgattcaaacaaggctatggttcctaaactaggaactggccttagttttgacagcacaggtgccattacagtaggaaacaaaaataatgataagctaactttgtggaccggaataaaccctccacctaactgtcaaattgtggaaaacactaatacaaatgatggcaaacttactttagtattagtaaaaaatggagggcttgttaatggctacgtgtctctagttggtgtatcagacactgtgaaccaaatgttcacacaaaagacagcaaacatccaattaagattatattttgactcttctggaaatctattaactgaggaatcagacttaaaaattccacttaaaaataaatcttctacagcgaccagtgaaactgtagccagcagcaaagcctttatgccaagtactacagcttatcccttcaacaccactactagggatagtgaaaactacattcatggaatatgttactacatgactagttatgatagaagtctatttcccttgaacatttctataatgctaaacagccgtatgatttcttccaatgttgcctatgccatacaatttgaatggaatctaaatgcaagtgaatctccagaaagcaacatagctacgctgaccacatccccctttttcttttcttacattacagaagacgacaactaaagaatcgtttgtgttatgtttcaacgtgtttatttttcaattgcagaaaatttcaagtcatttttcattcagtagtatagccccaccaccacatagcttatacagatcaccgtaccttaatcaaactcacagaaccctagtattcaacctgccacctccctcccaacacacagagtacacagtcctttctccccggctggccttaaaaagcatcatatcatgggtaacagacatattcttaggtgttatattccacacggtttcctgtcgagccaaacgctcatcagtgatattaataaactccccgggcagctcacttaagttcatgtcgctgtccagctgctgagccacaggctgctgtccaacttgcggttgcttaacgggcggcgaaggagaagtccacgctcacaggatagggcggtggtgctgcagcagcgcgcgaataaactgctgccgccgccgctccgtcctgcaggaatacaacatggcagtggtctcctcagcgatgattcgcaccgcccgcagcataaggcgccttgtcctccgggcacagcagcgcaccctgatctcacttaaatcagcacagtaactgcagcacagcaccacaatattgttcaaaatcccacagtgcaaggcgctgtatccaaagctcatggcggggaccacagaacccacgtggccatcataccacaagcgcaggtagattaagtggcgacccctcataaacacgctggacataaacattacctcttttggcatgttgtaattcaccacctcccggtaccatataaacctctgattaaacatggcgccatccaccaccatcctaaaccagctggccaaaacctgcccgccggctatacactgcagggaaccgggactggaacaatgacagtggagagcccaggactcgtaaccatggatcatcatgctcgtcatgatatcaatgttggcacaacacaggcacacgtgcatacacttcctcaggattacaagctcctcccgcgttagaaccatatcccagggaacaacccattcctgaatcagcgtaaatcccacactgcagggaagacctcgcacgtaactcacgttgtgcattgtcaaagtgttacattcgggcagcagcggatgatcctccagtatggtagcgcgggtttctgtctcaaaaggaggtagacgatccctactgtacggagtgcgccgagacaaccgagatcgtgttggtcgtagtgtcatgccaaatggaacgccggacgtagtcatatttcctgaagcaaaaccaggtgcgggcgtgacaaacagatctgcgtctccggtctcgccgcttagatcgctctgtgtagtagttgtagtatatccactctctcaaagcatccaggcgccccctggcttcgggttctatgtaaactccttcatgcgccgctgccctgataacatccaccaccgcagaataagccacacccagccaacctacacattcgttctgcgagtcacacacgggaggagcgggaagagctggaagaaccatgtttttttttttattccaaaagattatccaaaacctcaaaatgaagatctattaagtgaacgcgctcccctccggtggcgtggtcaaactctacagccaaagaacagataatggcatttgtaagatgttgcacaatggcttccaaaaggcaaacggccctcacgtccaagtggacgtaaaggctaaacccttcagggtgaatctcctctataaacattccagcaccttcaaccatgcccaaataattctcatctcgccaccttctcaatatatctctaagcaaatcccgaatattaagtccggccattgtaaaaatctgctccagagcgccctccaccttcagcctcaagcagcgaatcatgattgcaaaaattcaggttcctcacagacctgtataagattcaaaagcggaacattaacaaaaataccgcgatcccgtaggtcccttcgcagggccagctgaacataatcgtgcaggtctgcacggaccagcgcggccacttccccgccaggaaccatgacaaaagaacccacactgattatgacacgcatactcggagctatgctaaccagcgtagccccgatgtaagcttgttgcatgggcggcgatataaaatgcaaggtgctgctcaaaaaatcaggcaaagcctcgcgcaaaaaagaaagcacatcgtagtcatgctcatgcagataaaggcaggtaagctccggaaccaccacagaaaaagacaccatttttctctcaaacatgtctgcgggtttctgcataaacacaaaataaaataacaaaaaaacatttaaacattagaagcctgtcttacaacaggaaaaacaacccttataagcataagacggactacggccatgccggcgtgaccgtaaaaaaactggtcaccgtgattaaaaagcaccaccgacagctcctcggtcatgtccggagtcataatgtaagactcggtaaacacatcaggttgattcacatcggtcagtgctaaaaagcgaccgaaatagcccgggggaatacatacccgcaggcgtagagacaacattacagcccccataggaggtataacaaaattaataggagagaaaaacacataaacacctgaaaaaccctcctgcctaggcaaaatagcaccctcccgctccagaacaacatacagcgcttccacagcggcagccataacagtcagccttaccagtaaaaaagaaaacctattaaaaaaacaccactcgacacggcaccagctcaatcagtcacagtgtaaaaaagggccaagtgcagagcgagtatatataggactaaaaaatgacgtaacggttaaagtccacaaaaaacacccagaaaaccgcacgcgaacctacgcccagaaacgaaagccaaaaaacccacaacttcctcaaatcgtcacttccgttttcccacgttacgtcacttcccattttaagaaaactacaattcccaacacatacaagttactccgccctaaaacctacgtcacccgccccgttcccacgccccgcgccacgtcacaaactccaccccctcattatcatattggcttcaatccaaaataaggtatattattgatgatg

SEQ ID NO: 43 - DNA, 36122 bp, Artificial Sequence
  Adk35RF-Spike/E4orf6(RSV)-E4dl-42(E4re#41)
ttaattaacatcatcaataatataccttattttggattgaagccaatatgataatgagggggtggagtttgtgacgtggcgcggggcgtgggaacggggcgggtgacgtagtagtgtggcggaagtgtgatgttgcaagtgtggcggaacacatgtaagcgacggatgtggcaaaagtgacgtttttggtgtgcgccggtgtacacaggaagtgacaattttcgcgcggttttaggcggatgttgtagtaaatttgggcgtaaccgagtaagatttggccattttcgcgggaaaactgaataagaggaagtgaaatctgaataattttgtgttactcatagcgcgtaataatttgatccgcgttaagatacattgatgagtttggacaaaccacaactagaatgcagtgaaaaaaatgctttatttgtgaaatttgtgatgctattgctttatttgtaaccattataagctgcaataaacaagttaacaacaacaattgcattcattttatgtttcaggttcagggggaggtgtgggaggttttttaaagcaagtaaaacctctacaaatgtggtatggctgattatgatcaattttcatggccacttgatgtattgttcatatttgcccagttcttggaggtcaatcagggactcattcaggttcttagccacctcattcagtctgtcaatctccttctggatgttcaccacagaggcattgatgccagagatgtctcccaggtccacatcagggctggtgtggttcttgaagtatttgtccagttcctccttgaaggagtccagttcaggttggagtgggtcatagactgtgttgttcacaatgccaatcaccacatcacagttgccagacacaaaggtgttgtctgtggtgataatctgtggttcatagaagttcctctgggtcacaaaccagtgggtgccattgctcacaaacactccctcccttggaaagtgagccttgccatcatggcagatggcaggggctgtggtgaagttcttctcctgggcaggcacataggtcacatgcaggaacaccactccatgaggggcagactgtggaaaactcatcaggtggtagcccttgccacagaagtccaccctcttgctttgtcccagcacacactcactcatcttggtggcagccaggttggcagatgccctaatctcagcagccctgataagttgttgggtcacataggtttggagggattggagtctgcctgtaatcagtctgtcaatctggacctcagcctccaccttgtccagtctgctcaggatgtcattcagcacagaggagatggctccaaagttgctggaaagttgcttcaccagggtgttcagagcctgggcattctggttcaccacatcttggagtttgcccagggcagaggctgtgctggacagggagtcctgaatcttgccaatggcagagttgaactggttggcaatcagtttctggttctcatagagcacattctgggtcactccaatgccattgaacctgtaagccatctgcatagcaaatgggatttggagggctgctcctgctccaaaggtccagccagaggtgatggtgccagccagcagggcagaggtgtattgggcaatcatctcatctgtcagcagtggaggcagcactgtcagtccattgaacttctgggcacaaatcaggtccctggcagcaatgtctcccagacagtctccatattgcttgatgaagccagcatcagccagggtcaccttgttgaacagcaggtcctcaatgaaggacctcttgcttggcttgcttgggtcaggcagaatctggctgaagttgaagcctccaaagtccttgattggaggtgtcttgtaaatctgcttcacctgggcaaacacctcctgggtgttcttgtcctgttccacagcaatgcctgtcagagccctgttaagttgggtacagaaggagccatattggagcagcaggttgctacactctgtgctgtctccacagatatacattgtacagtccacagaggtcttggtcatactcacaggcagaatctctgtggtcacagagatggtgaagttggttgggatggcaatgctgttgttgctgtaagccacagagttctctgctcccagactcattgtgtaggcaatgatgctctggcttgccacagacctcgacccaccgccaccggtctgggtctggtaggaggcacagatgcctgctccaattgggatgtcacactcataggagttgttcacatgctctgctccaatcagacagccagccctggtctggaacacattgctgcctgtgctgtagaccctccaggttggtgtaagttggtcagcatggatagccacaggcacctcagtacagttcacatcctggtagagcacagccacctggttgctggtgttggtgccaggtgtaatcacagacactcctccaaaggaacatggtgtgatgtccagaatctccaaggtctgtgggtccctcacagcatctgtggtgtcagcaatgtccctgccaaactgttggaatggcaggaacttcttgttgctctctgtcagcactcctgtgcctgtcagtccattgaagttgaagttcacacacttgttcttcaccaggttggtgctcttctttggtccacacactgtggcaggggcatggagcagttcaaaggacagcaccaccaccctgtatggttggtagcccactccattggttggttggaagccataggattggagtggaaagtaacagttgaagccctccactccattacatggtgtgctgccagcctggtaaatctctgtgctgatgtccctctcaaatggtttcaggttgctcttcctgaacagtctgtagaggtagttgtagttgcctcccaccttgctgtccaggttgttgctgttccaggcaatcacacagcctgtgaagtcatcaggcagtttgtagttgtagtcagcaatcttgcctgtttgtccaggggcaatctgtctcacctcatctcccctaatcacaaaggagtcagcatagacattggtgaaacacaggtcattcagtttggttgggctcactccataacacttgaaggtgctgaaggaggcagagttgtagagcacagagtagtcagccacacagttgctaatcctcttcctgttccaggcatagacagaggcaaacctggtggcattgaacacctctccaaatggacacaggttggtgatgtttggaaacctcacaatgctctctgttggttggaccctgaagttgctggtctggtagatgcccttctccactgtgaaggatttcagggtacacttggtctcagacagtgggtccagggcacagtccacagcatctgtgatggtgccattctcattgtatttcagcaggaaggtccttggttggaggtagcccacatagtaggctgctgctcctgctgtccagccagaggaggagtctccaggtgtcaggtaggacctgtgcagagccagcagggtctggaacctggtgatgttgatgccaattggcaggtccaccagtggttccaaggcagagaagccctgtggcaggtccctcaccaggttgattggtgtgtgtttgctgtaaatcttgaagtagccatcaatgttcttgaacacaaactccctcaggttcttgaagttgccctgcttgccctccaagtccatcaggaatggttggctcacatattcaaaggtacagttgttggcagaggagtagaccctgaactcagactccatccaggacttgttgttcttgtggtagtagactcccaggaatgggtcattacagaactggaactcacacaccttaatcaccacattggtggcattgttcacaatcagcagggactgggtcttgctgtccagggtggtgccaaaaatccagcccctgatgatgttgctcttctctgtgctggcaaagtagactccatcattgaatggcagcacagggttgtcaaacctcttggtgccattggtgccagacacatggatggcatggaaccaggtcacattgctgaagaatggcaggaacaggtcctgggtgctgtgcagcacagaggacctgaacaccttgtcagggtagtagactcccctggtgaaggagttggtgtaggcaggaggaagttgggtcctggtggtcaggttcacacactggctggacaccagtggcagcagcaccaggaacacaaacatggtggcaaatcggaggctggatcggtcccggtgtcttctatggaggtcaaaacagcgtggatggcgtctccaggcgatctgacggttcactaaacgagctcgtcgacgatctctatcactgatagggagatctctatcactgatagggagagctctgcttatatagacctcccaccgtacacgcctaccgcccatttgcgtcaatggggcggagttgttacgacattttggaaagtcccgttgattttggtgccaaaacaaactcccattgacgtcaatggggtggagacttggaaatccccgtgagtcaaaccgctatccacgcccattgatgtactgccaaaaccgcatcaccatggtaatagcgatgactaatacgtagatgtactgccaagtaggaaagtcccataaggtcatgtactgggcataatgccaggcgggccatttaccgtcattgacgtcaatagggggcgtacttggcatatgatacacttgatgtactgccaagtgggcagtttaccgtaaatactccacccattgacgtcaatggaaagtccctattggcgttactatgggaacatacgtcattattgacgtcaatgggcgggggtcgttgggcggtcagccaggcgggccatttaccgtaagttatgtaacgcggaactccatatatgggctatgaactaatgaccccgtaattgattactattacagtgtagtcttatgcaatactcttgtagtcttgcaacatggtaacgatgagttagcaacatgccttacaaggagagaaaaagcaccgtgcatgccgattggtggaagtaaggtggtacgatcgtgccttattaggaaggcaacagacgggtctgacatggattggacgaaccactgaattgccgcattgcagagatattgtatttaagtgcctagctcgatacataaacaaactaccccaagctggccaccatgactacgtccggcgttccatttggcatgacactacgaccaacacgatctcggttgtctcggcgcactccgtacagtagggatcgtctacctccttttgagacagaaacccgcgctaccatactggaggatcatccgctgctgcccgaatgtaacactttgacaatgcacaacgtgagttacgtgcgaggtcttccctgcagtgtgggatttacgctgattcaggaatgggttgttccctgggatatggttctaacgcgggaggagcttgtaatcctgaggaagtgtatgcacgtgtgcctgtgttgtgccaacattgatatcatgacgagcatgatgatccatggttacgagtcctgggctctccactgtcattgttccagtcccggttccctgcagtgtatagccggcgggcaggttttggccagctggtttaggatggtggtggatggcgccatgtttaatcagaggtttatatggtaccgggaggtggtgaattacaacatgccaaaagaggtaatgtttatgtccagcgtgtttatgaggggtcgccacttaatctacctgcgcttgtggtatgatggccacgtgggttctgtggtccccgccatgagctttggatacagcgccttgcactgtgggattttgaacaatattgtggtgctgtgctgcagttactgtgctgatttaagtgagatcagggtgcgctgctgtgcccggaggacaaggcgccttatgctgcgggcggtgcgaatcatcgctgaggagaccactgccatgttgtattcctgcaggacggagcggcggcggcagcagtttattcgcgcgctgctgcagcaccaccgccctatcctgatgcacgattatgactctacccccatgtagaagcttggggatcaattctctagagctcgctgatcagcctcgactgtgccttctagttgccagccatctgttgtttgcccctcccccgtgccttccttgaccctggaaggtgccactcccactgtcctttcctaataaaatgaggaaattgcatcgcattgtctgagtaggtgtcattctattctggggggtggggtggggcaggacagcaagggggaggattgggaagacaatagcaggcatgctggggatgcggtgggctctatggcttctgaggaaattgggcgtggcttaagggtgggaaagaatatataaggtgggggtcttatgtagttttgtatctgttttgcagcagccgccgccgccatgagcaccaactcgtttgatggaagcattgtgagctcatatttgacaacgcgcatgcccccatgggccggggtgcgtcagaatgtgatgggctccagcattgatggtcgccccgtcctgcccgcaaactctactaccttgacctacgagaccgtgtctggaacgccgttggagactgcagcctccgccgccgcttcagccgctgcagccaccgcccgcgggattgtgactgactttgctttcctgagcccgcttgcaagcagtgcagcttcccgttcatccgcccgcgatgacaagttgacggctcttttggcacaattggattctttgacccgggaacttaatgtcgtttctcagcagctgttggatctgcgccagcaggtttctgccctgaaggcttcctcccctcccaatgcggtttaaaacataaataaaaaaccagactctgtttggatttggatcaagcaagtgtcttgctgtctttatttaggggttttgcgcgcgcggtaggcccgggaccagcggtctcggtcgttgagggtcctgtgtattttttccaggacgtggtaaaggtgactctggatgttcagatacatgggcataagcccgtctctggggtggaggtagcaccactgcagagcttcatgctgcggggtggtgttgtagatgatccagtcgtagcaggagcgctgggcgtggtgcctaaaaatgtctttcagtagcaagctgattgccaggggcaggcccttggtgtaagtgtttacaaagcggttaagctgggatgggtgcatacgtggggatatgagatgcatcttggactgtatttttaggttggctatgttcccagccatatccctccggggattcatgttgtgcagaaccaccagcacagtgtatccggtgcacttgggaaatttgtcatgtagcttagaaggaaatgcgtggaagaacttggagacgcccttgtgacctccaagattttccatgcattcgtccataatgatggcaatgggcccacgggcggcggcctgggcgaagatatttctgggatcactaacgtcatagttgtgttccaggatgagatcgtcataggccatttttacaaagcgcgggcggagggtgccagactgcggtataatggttccatccggcccaggggcgtagttaccctcacagatttgcatttcccacgctttgagttcagatggggggatcatgtctacctgcggggcgatgaagaaaacggtttccggggtaggggagatcagctgggaagaaagcaggttcctgagcagctgcgacttaccgcagccggtgggcccgtaaatcacacctattaccggctgcaactggtagttaagagagctgcagctgccgtcatccctgagcaggggggccacttcgttaagcatgtccctgactcgcatgttttccctgaccaaatccgccagaaggcgctcgccgcccagcgatagcagttcttgcaaggaagcaaagtttttcaacggtttgagaccgtccgccgtaggcatgcttttgagcgtttgaccaagcagttccaggcggtcccacagctcggtcacctgctctacggcatctcgatccagcatatctcctcgtttcgcgggttggggcggctttcgctgtacggcagtagtcggtgctcgtccagacgggccagggtcatgtctttccacgggcgcagggtcctcgtcagcgtagtctgggtcacggtgaaggggtgcgctccgggctgcgcgctggccagggtgcgcttgaggctggtcctgctggtgctgaagcgctgccggtcttcgccctgcgcgtcggccaggtagcatttgaccatggtgtcatagtccagcccctccgcggcgtggcccttggcgcgcagcttgcccttggaggaggcgccgcacgaggggcagtgcagacttttgagggcgtagagcttgggcgcgagaaataccgattccggggagtaggcatccgcgccgcaggccccgcagacggtctcgcattccacgagccaggtgagctctggccgttcggggtcaaaaaccaggtttcccccatgctttttgatgcgtttcttacctctggtttccatgagccggtgtccacgctcggtgacgaaaaggctgtccgtgtccccgtatacagacttgagaggcctgtcctcgagcggtgttccgcggtcctcctcgtatagaaactcggaccactctgagacaaaggctcgcgtccaggccagcacgaaggaggctaagtgggaggggtagcggtcgttgtccactagggggtccactcgctccagggtgtgaagacacatgtcgccctcttcggcatcaaggaaggtgattggtttgtaggtgtaggccacgtgaccgggtgttcctgaaggggggctataaaagggggtgggggcgcgttcgtcctcactctcttccgcatcgctgtctgcgagggccagctgttggggtgagtactccctctgaaaagcgggcatgacttctgcgctaagattgtcagtttccaaaaacgaggaggatttgatattcacctggcccgcggtgatgcctttgagggtggccgcatccatctggtcagaaaagacaatctttttgttgtcaagcttggtggcaaacgacccgtagagggcgttggacagcaacttggcgatggagcgcagggtttggtttttgtcgcgatcggcgcgctccttggccgcgatgtttagctgcacgtattcgcgcgcaacgcaccgccattcgggaaagacggtggtgcgctcgtcgggcaccaggtgcacgcgccaaccgcggttgtgcagggtgacaaggtcaacgctggtggctacctctccgcgtaggcgctcgttggtccagcagaggcggccgcccttgcgcgagcagaatggcggtagggggtctagctgcgtctcgtccggggggtctgcgtccacggtaaagaccccgggcagcaggcgcgcgtcgaagtagtctatcttgcatccttgcaagtctagcgcctgctgccatgcgcgggcggcaagcgcgcgctcgtatgggttgagtgggggaccccatggcatggggtgggtgagcgcggaggcgtacatgccgcaaatgtcgtaaacgtagaggggctctctgagtattccaagatatgtagggtagcatcttccaccgcggatgctggcgcgcacgtaatcgtatagttcgtgcgagggagcgaggaggtcgggaccgaggttgctacgggcgggctgctctgctcggaagactatctgcctgaagatggcatgtgagttggatgatatggttggacgctggaagacgttgaagctggcgtctgtgagacctaccgcgtcacgcacgaaggaggcgtaggagtcgcgcagcttgttgaccagctcggcggtgacctgcacgtctagggcgcagtagtccagggtttccttgatgatgtcatacttatcctgtcccttttttttccacagctcgcggttgaggacaaactcttcgcggtctttccagtactcttggatcggaaacccgtcggcctccgaacggtaagagcctagcatgtagaactggttgacggcctggtaggcgcagcatcccttttctacgggtagcgcgtatgcctgcgcggccttccggagcgaggtgtgggtgagcgcaaaggtgtccctgaccatgactttgaggtactggtatttgaagtcagtgtcgtcgcatccgccctgctcccagagcaaaaagtccgtgcgctttttggaacgcggatttggcagggcgaaggtgacatcgttgaagagtatctttcccgcgcgaggcataaagttgcgtgtgatgcggaagggtcccggcacctcggaacggttgttaattacctgggcggcgagcacgatctcgtcaaagccgttgatgttgtggcccacaatgtaaagttccaagaagcgcgggatgcccttgatggaaggcaattttttaagttcctcgtaggtgagctcttcaggggagctgagcccgtgctctgaaagggcccagtctgcaagatgagggttggaagcgacgaatgagctccacaggtcacgggccattagcatttgcaggtggtcgcgaaaggtcctaaactggcgacctatggccattttttctggggtgatgcagtagaaggtaagcgggtcttgttcccagcggtcccatccaaggttcgcggctaggtctcgcgcggcagtcactagaggctcatctccgccgaacttcatgaccagcatgaagggcacgagctgcttcccaaaggcccccatccaagtataggtctctacatcgtaggtgacaaagagacgctcggtgcgaggatgcgagccgatcgggaagaactggatctcccgccaccaattggaggagtggctattgatgtggtgaaagtagaagtccctgcgacgggccgaacactcgtgctggcttttgtaaaaacgtgcgcagtactggcagcggtgcacgggctgtacatcctgcacgaggttgacctgacgaccgcgcacaaggaagcagagtgggaatttgagcccctcgcctggcgggtttggctggtggtcttctacttcggctgcttgtccttgaccgtctggctgctcgaggggagttacggtggatcggaccaccacgccgcgcgagcccaaagtccagatgtccgcgcgcggcggtcggagcttgatgacaacatcgcgcagatgggagctgtccatggtctggagctcccgcggcgtcaggtcaggcgggagctcctgcaggtttacctcgcatagacgggtcagggcgcgggctagatccaggtgatacctaatttccaggggctggttggtggcggcgtcgatggcttgcaagaggccgcatccccgcggcgcgactacggtaccgcgcggcgggcggtgggccgcgggggtgtccttggatgatgcatctaaaagcggtgacgcgggcgagcccccggaggtagggggggctccggacccgccgggagagggggcaggggcacgtcggcgccgcgcgcgggcaggagctggtgctgcgcgcgtaggttgctggcgaacgcgacgacgcggcggttgatctcctgaatctggcgcctctgcgtgaagacgacgggcccggtgagcttgaacctgaaagagagttcgacagaatcaatttcggtgtcgttgacggcggcctggcgcaaaatctcctgcacgtctcctgagttgtcttgataggcgatctcggccatgaactgctcgatctcttcctcctggagatctccgcgtccggctcgctccacggtggcggcgaggtcgttggaaatgcgggccatgagctgcgagaaggcgttgaggcctccctcgttccagacgcggctgtagaccacgcccccttcggcatcgcgggcgcgcatgaccacctgcgcgagattgagctccacgtgccgggcgaagacggcgtagtttcgcaggcgctgaaagaggtagttgagggtggtggcggtgtgttctgccacgaagaagtacataacccagcgtcgcaacgtggattcgttgatatcccccaaggcctcaaggcgctccatggcctcgtagaagtccacggcgaagttgaaaaactgggagttgcgcgccgacacggttaactcctcctccagaagacggatgagctcggcgacagtgtcgcgcacctcgcgctcaaaggctacaggggcctcttcttcttcttcaatctcctcttccataagggcctccccttcttcttcttctggcggcggtgggggaggggggacacggcggcgacgacggcgcaccgggaggcggtcgacaaagcgctcgatcatctccccgcggcgacggcgcatggtctcggtgacggcgcggccgttctcgcgggggcgcagttggaagacgccgcccgtcatgtcccggttatgggttggcggggggctgccatgcggcagggatacggcgctaacgatgcatctcaacaattgttgtgtaggtactccgccgccgagggacctgagcgagtccgcatcgaccggatcggaaaacctctcgagaaaggcgtctaaccagtcacagtcgcaaggtaggctgagcaccgtggcgggcggcagcgggcggcggtcggggttgtttctggcggaggtgctgctgatgatgtaattaaagtaggcggtcttgagacggcggatggtcgacagaagcaccatgtccttgggtccggcctgctgaatgcgcaggcggtcggccatgccccaggcttcgttttgacatcggcgcaggtctttgtagtagtcttgcatgagcctttctaccggcacttcttcttctccttcctcttgtcctgcatctcttgcatctatcgctgcggcggcggcggagtttggccgtaggtggcgccctcttcctcccatgcgtgtgaccccgaagcccctcatcggctgaagcagggctaggtcggcgacaacgcgctcggctaatatggcctgctgcacctgcgtgagggtagactggaagtcatccatgtccacaaagcggtggtatgcgcccgtgttgatggtgtaagtgcagttggccataacggaccagttaacggtctggtgacccggctgcgagagctcggtgtacctgagacgcgagtaagccctcgagtcaaatacgtagtcgttgcaagtccgcaccaggtactggtatcccaccaaaaagtgcggcggcggctggcggtagaggggccagcgtagggtggccggggctccgggggcgagatcttccaacataaggcgatgatatccgtagatgtacctggacatccaggtgatgccggcggcggtggtggaggcgcgcggaaagtcgcggacgcggttccagatgttgcgcagcggcaaaaagtgctccatggtcgggacgctctggccggtcaggcgcgcgcaatcgttgacgctctagcgtgcaaaaggagagcctgtaagcgggcactcttccgtggtctggtggataaattcgcaagggtatcatggcggacgaccggggttcgagccccgtatccggccgtccgccgtgatccatgcggttaccgcccgcgtgtcgaacccaggtgtgcgacgtcagacaacgggggagtgctccttttggcttccttccaggcgcggcggctgctgcgctagcttttttggccactggccgcgcgcagcgtaagcggttaggctggaaagcgaaagcattaagtggctcgctccctgtagccggagggttattttccaagggttgagtcgcgggacccccggttcgagtctcggaccggccggactgcggcgaacgggggtttgcctccccgtcatgcaagaccccgcttgcaaattcctccggaaacagggacgagccccttttttgcttttcccagatgcatccggtgctgcggcagatgcgcccccctcctcagcagcggcaagagcaagagcagcggcagacatgcagggcaccctcccctcctcctaccgcgtcaggaggggcgacatccgcggttgacgcggcagcagatggtgattacgaacccccgcggcgccgggcccggcactacctggacttggaggagggcgagggcctggcgcggctaggagcgccctctcctgagcggcacccaagggtgcagctgaagcgtgatacgcgtgaggcgtacgtgccgcggcagaacctgtttcgcgaccgcgagggagaggagcccgaggagatgcgggatcgaaagttccacgcagggcgcgagctgcggcatggcctgaatcgcgagcggttgctgcgcgaggaggactttgagcccgacgcgcgaaccgggattagtcccgcgcgcgcacacgtggcggccgccgacctggtaaccgcatacgagcagacggtgaaccaggagattaactttcaaaaaagctttaacaaccacgtgcgtacgcttgtggcgcgcgaggaggtggctataggactgatgcatctgtgggactttgtaagcgcgctggagcaaaacccaaatagcaagccgctcatggcgcagctgttccttatagtgcagcacagcagggacaacgaggcattcagggatgcgctgctaaacatagtagagcccgagggccgctggctgctcgatttgataaacatcctgcagagcatagtggtgcaggagcgcagcttgagcctggctgacaaggtggccgccatcaactattccatgcttagcctgggcaagttttacgcccgcaagatataccataccccttacgttcccatagacaaggaggtaaagatcgaggggttctacatgcgcatggcgctgaaggtgcttaccttgagcgacgacctgggcgtttatcgcaacgagcgcatccacaaggccgtgagcgtgagccggcggcgcgagctcagcgaccgcgagctgatgcacagcctgcaaagggccctggctggcacgggcagcggcgatagagaggccgagtcctactttgacgcgggcgctgacctgcgctgggccccaagccgacgcgccctggaggcagctggggccggacctgggctggcggtggcacccgcgcgcgctggcaacgtcggcggcgtggaggaatatgacgaggacgatgagtacgagccagaggacggcgagtactaagcggtgatgtttctgatcagatgatgcaagacgcaacggacccggcggtgcgggcggcgctgcagagccagccgtccggccttaactccacggacgactggcgccaggtcatggaccgcatcatgtcgctgactgcgcgcaatcctgacgcgttccggcagcagccgcaggccaaccggctctccgcaattctggaagcggtggtcccggcgcgcgcaaaccccacgcacgagaaggtgctggcgatcgtaaacgcgctggccgaaaacagggccatccggcccgacgaggccggcctggtctacgacgcgctgcttcagcgcgtggctcgttacaacagcggcaacgtgcagaccaacctggaccggctggtgggggatgtgcgcgaggccgtggcgcagcgtgagcgcgcgcagcagcagggcaacctgggctccatggttgcactaaacgccttcctgagtacacagcccgccaacgtgccgcggggacaggaggactacaccaactttgtgagcgcactgcggctaatggtgactgagacaccgcaaagtgaggtgtaccagtctgggccagactattttttccagaccagtagacaaggcctgcagaccgtaaacctgagccaggctttcaaaaacttgcaggggctgtggggggtgcgggctcccacaggcgaccgcgcgaccgtgtctagcttgctgacgcccaactcgcgcctgttgctgctgctaatagcgcccttcacggacagtggcagcgtgtcccgggacacatacctaggtcacttgctgacactgtaccgcgaggccataggtcaggcgcatgtggacgagcatactttccaggagattacaagtgtcagccgcgcgctggggcaggaggacacgggcagcctggaggcaaccctaaactacctgctgaccaaccggcggcagaagatcccctcgttgcacagtttaaacagcgaggaggagcgcattttgcgctacgtgcagcagagcgtgagccttaacctgatgcgcgacggggtaacgcccagcgtggcgctggacatgaccgcgcgcaacatggaaccgggcatgtatgcctcaaaccggccgtttatcaaccgcctaatggactacttgcatcgcgcggccgccgtgaaccccgagtatttcaccaatgccatcttgaacccgcactggctaccgccccctggtttctacaccgggggattcgaggtgcccgagggtaacgatggattcctctgggacgacatagacgacagcgtgttttccccgcaaccgcagaccctgctagagttgcaacagcgcgagcaggcagaggcggcgctgcgaaaggaaagcttccgcaggccaagcagcttgtccgatctaggcgctgcggccccgcggtcagatgctagtagcccatttccaagcttgatagggtctcttaccagcactcgcaccacccgcccgcgcctgctgggcgaggaggagtacctaaacaactcgctgctgcagccgcagcgcgaaaaaaacctgcctccggcatttcccaacaacgggatagagagcctagtggacaagatgagtagatggaagacgtacgcgcaggagcacagggacgtgccaggcccgcgcccgcccacccgtcgtcaaaggcacgaccgtcagcggggtctggtgtgggaggacgatgactcggcagacgacagcagcgtcctggatttgggagggagtggcaacccgtttgcgcaccttcgccccaggctggggagaatgttttaaaaaaaaaaaagcatgatgcaaaataaaaaactcaccaaggccatggcaccgagcgttggttttcttgtattccccttagtatgcggcgcgcggcgatgtatgaggaaggtcctcctccctcctacgagagtgtggtgagcgcggcgccagtggcggcggcgctgggttctcccttcgatgctcccctggacccgccgtttgtgcctccgcggtacctgcggcctaccggggggagaaacagcatccgttactctgagttggcacccctattcgacaccacccgtgtgtacctggtggacaacaagtcaacggatgtggcatccctgaactaccagaacgaccacagcaactttctgaccacggtcattcaaaacaatgactacagcccgggggaggcaagcacacagaccatcaatcttgacgaccggtcgcactggggcggcgacctgaaaaccatcctgcataccaacatgccaaatgtgaacgagttcatgtttaccaataagtttaaggcgcgggtgatggtgtcgcgcttgcctactaaggacaatcaggtggagctgaaatacgagtgggtggagttcacgctgcccgagggcaactactccgagaccatgaccatagaccttatgaacaacgcgatcgtggagcactacttgaaagtgggcagacagaacggggttctggaaagcgacatcggggtaaagtttgacacccgcaacttcagactggggtttgaccccgtcactggtcttgtcatgcctggggtatatacaaacgaagccttccatccagacatcattttgctgccaggatgcggggtggacttcacccacagccgcctgagcaacttgttgggcatccgcaagcggcaacccttccaggagggctttaggatcacctacgatgatctggagggtggtaacattcccgcactgttggatgtggacgcctaccaggcgagcttgaaagatgacaccgaacagggcgggggtggcgcaggcggcagcaacagcagtggcagcggcgcggaagagaactccaacgcggcagccgcggcaatgcagccggtggaggacatgaacgatcatgccattcgcggcgacacctttgccacacgggctgaggagaagcgcgctgaggccgaagcagcggccgaagctgccgcccccgctgcgcaacccgaggtcgagaagcctcagaagaaaccggtgatcaaacccctgacagaggacagcaagaaacgcagttacaacctaataagcaatgacagcaccttcacccagtaccgcagctggtaccttgcatacaactacggcgaccctcagaccggaatccgctcatggaccctgctttgcactcctgacgtaacctgcggctcggagcaggtctactggtcgttgccagacatgatgcaagaccccgtgaccttccgctccacgcgccagatcagcaactttccggtggtgggcgccgagctgttgcccgtgcactccaagagcttctacaacgaccaggccgtctactcccaactcatccgccagtttacctctctgacccacgtgttcaatcgctttcccgagaaccagattttggcgcgcccgccagcccccaccatcaccaccgtcagtgaaaacgttcctgctctcacagatcacgggacgctaccgctgcgcaacagcatcggaggagtccagcgagtgaccattactgacgccagacgccgcacctgcccctacgtttacaaggccctgggcatagtctcgccgcgcgtcctatcgagccgcactttttgagcaagcatgtccatccttatatcgcccagcaataacacaggctggggcctgcgcttcccaagcaagatgtttggcggggccaagaagcgctccgaccaacacccagtgcgcgtgcgcgggcactaccgcgcgccctggggcgcgcacaaacgcggccgcactgggcgcaccaccgtcgatgacgccatcgacgcggtggtggaggaggcgcgcaactacacgcccacgccgccaccagtgtccacagtggacgcggccattcagaccgtggtgcgcggagcccggcgctatgctaaaatgaagagacggcggaggcgcgtagcacgtcgccaccgccgccgacccggcactgccgcccaacgcgcggcggcggccctgcttaaccgcgcacgtcgcaccggccgacgggcggccatgcgggccgctcgaaggctggccgcgggtattgtcactgtgccccccaggtccaggcgacgagcggccgccgcagcagccgcggccattagtgctatgactcagggtcgcaggggcaacgtgtattgggtgcgcgactcggttagcggcctgcgcgtgcccgtgcgcacccgccccccgcgcaactagattgcaagaaaaaactacttagactcgtactgttgtatgtatccagcggcggcggcgcgcaacgaagctatgtccaagcgcaaaatcaaagaagagatgctccaggtcatcgcgccggagatctatggccccccgaagaaggaagagcaggattacaagccccgaaagctaaagcgggtcaaaaagaaaaagaaagatgatgatgatgaacttgacgacgaggtggaactgctgcacgctaccgcgcccaggcgacgggtacagtggaaaggtcgacgcgtaaaacgtgttttgcgacccggcaccaccgtagtctttacgcccggtgagcgctccacccgcacctacaagcgcgtgtatgatgaggtgtacggcgacgaggacctgcttgagcaggccaacgagcgcctcggggagtttgcctacggaaagcggcataaggacatgctggcgttgccgctggacgagggcaacccaacacctagcctaaagcccgtaacactgcagcaggtgctgcccgcgcttgcaccgtccgaagaaaagcgcggcctaaagcgcgagtctggtgacttggcacccaccgtgcagctgatggtacccaagcgccagcgactggaagatgtcttggaaaaaatgaccgtggaacctgggctggagcccgaggtccgcgtgcggccaatcaagcaggtggcgccgggactgggcgtgcagaccgtggacgttcagatacccactaccagtagcaccagtattgccaccgccacagagggcatggagacacaaacgtccccggttgcctcagcggtggcggatgccgcggtgcaggcggtcgctgcggccgcgtccaagacctctacggaggtgcaaacggacccgtggatgtttcgcgtttcagccccccggcgcccgcgccgttcgaggaagtacggcgccgccagcgcgctactgcccgaatatgccctacatccttccattgcgcctacccccggctatcgtggctacacctaccgccccagaagacgagcaactacccgacgccgaaccaccactggaacccgccgccgccgtcgccgtcgccagcccgtgctggccccgatttccgtgcgcagggtggctcgcgaaggaggcaggaccctggtgctgccaacagcgcgctaccaccccagcatcgtttaaaagccggtctttgtggttcttgcagatatggccctcacctgccgcctccgtttcccggtgccgggattccgaggaagaatgcaccgtaggaggggcatggccggccacggcctgacgggcggcatgcgtcgtgcgcaccaccggcggcggcgcgcgtcgcaccgtcgcatgcgcggcggtatcctgcccctccttattccactgatcgccgcggcgattggcgccgtgcccggaattgcatccgtggccttgcaggcgcagagacactgattaaaaacaagttgcatgtggaaaaatcaaaataaaaagtctggactctcacgctcgcttggtcctgtaactattttgtagaatggaagacatcaactttgcgtctctggccccgcgacacggctcgcgcccgttcatgggaaactggcaagatatcggcaccagcaatatgagcggtggcgccttcagctggggctcgctgtggagcggcattaaaaatttcggttccaccgttaagaactatggcagcaaggcctggaacagcagcacaggccagatgctgagggataagttgaaagagcaaaatttccaacaaaaggtggtagatggcctggcctctggcattagcggggtggtggacctggccaaccaggcagtgcaaaataagattaacagtaagcttgatccccgccctcccgtagaggagcctccaccggccgtggagacagtgtctccagaggggcgtggcgaaaagcgtccgcgccccgacagggaagaaactctggtgacgcaaatagacgagcctccctcgtacgaggaggcactaaagcaaggcctgcccaccacccgtcccatcgcgcccatggctaccggagtgctgggccagcacacacccgtaacgctggacctgcctccccccgccgacacccagcagaaacctgtgctgccaggcccgaccgccgttgttgtaacccgtcctagccgcgcgtccctgcgccgcgccgccagcggtccgcgatcgttgcggcccgtagccagtggcaactggcaaagcacactgaacagcatcgtgggtctgggggtgcaatccctgaagcgccgacgatgcttctgatagctaacgtgtcgtatgtgtgtcatgtatgcgtccatgtcgccgccagaggagctgctgagccgccgcgcgcccgctttccaagatggctaccccttcgatgatgccgcagtggtcttacatgcacatctcgggccaggacgcctcggagtacctgagccccgggctggtgcagtttgcccgcgccaccgagacgtacttcagcctgaataacaagtttagaaaccccacggtggcgcctacgcacgacgtgaccacagaccggtcccagcgtttgacgctgcggttcatccctgtggaccgtgaggatactgcgtactcgtacaaggcgcggttcaccctagctgtgggtgataaccgtgtgctggacatggcttccacgtactttgacatccgcggcgtgctggacaggggccctacttttaagccctactctggcactgcctacaacgccctggctcccaagggtgccccaaatccttgcgaatgggatgaagctgctactgctcttgaaataaacctagaagaagaggacgatgacaacgaagacgaagtagacgagcaagctgagcagcaaaaaactcacgtatttgggcaggcgccttattctggtataaatattacaaaggagggtattcaaataggtgtcgaaggtcaaacacctaaatatgccgataaaacatttcaacctgaacctcaaataggagaatctcagtggtacgaaacagaaattaatcatgcagctgggagagtcctaaaaaagactaccccaatgaaaccatgttacggttcatatgcaaaacccacaaatgaaaatggagggcaaggcattcttgtaaagcaacaaaatggaaagctagaaagtcaagtggaaatgcaatttttctcaactactgaggcagccgcaggcaatggtgataacttgactcctaaagtggtattgtacagtgaagatgtagatatagaaaccccagacactcatatttcttacatgcccactattaaggaaggtaactcacgagaactaatgggccaacaatctatgcccaacaggcctaattacattgcttttagggacaattttattggtctaatgtattacaacagcacgggtaatatgggtgttctggcgggccaagcatcgcagttgaatgctgttgtagatttgcaagacagaaacacagagctttcataccagcttttgcttgattccattggtgatagaaccaggtacttttctatgtggaatcaggctgttgacagctatgatccagatgttagaattattgaaaatcatggaactgaagatgaacttccaaattactgctttccactgggaggtgtgattaatacagagactcttaccaaggtaaaacctaaaacaggtcaggaaaatggatgggaaaaagatgctacagaattttcagataaaaatgaaataagagttggaaataattttgccatggaaatcaatctaaatgccaacctgtggagaaatttcctgtactccaacatagcgctgtatttgcccgacaagctaaagtacagtccttccaacgtaaaaatttctgataacccaaacacctacgactacatgaacaagcgagtggtggctcccgggctagtggactgctacattaaccttggagcacgctggtcccttgactatatggacaacgtcaacccatttaaccaccaccgcaatgctggcctgcgctaccgctcaatgttgctgggcaatggtcgctatgtgcccttccacatccaggtgcctcagaagttctttgccattaaaaacctccttctcctgccgggctcatacacctacgagtggaacttcaggaaggatgttaacatggttctgcagagctccctaggaaatgacctaagggttgacggagccagcattaagtttgatagcatttgcctttacgccaccttcttccccatggcccacaacaccgcctccacgcttgaggccatgcttagaaacgacaccaacgaccagtcctttaacgactatctctccgccgccaacatgctctaccctatacccgccaacgctaccaacgtgcccatatccatcccctcccgcaactgggcggctttccgcggctgggccttcacgcgccttaagactaaggaaaccccatcactgggctcgggctacgacccttattacacctactctggctctataccctacctagatggaaccttttacctcaaccacacctttaagaaggtggccattacctttgactcttctgtcagctggcctggcaatgaccgcctgcttacccccaacgagtttgaaattaagcgctcagttgacggggagggttacaacgttgcccagtgtaacatgaccaaagactggttcctggtacaaatgctagctaactataacattggctaccagggcttctatatcccagagagctacaaggaccgcatgtactccttctttagaaacttccagcccatgagccgtcaggtggtggatgatactaaatacaaggactaccaacaggtgggcatcctacaccaacacaacaactctggatttgttggctaccttgcccccaccatgcgcgaaggacaggcctaccctgctaacttcccctatccgcttataggcaagaccgcagttgacagcattacccagaaaaagtttctttgcgatcgcaccctttggcgcatcccattctccagtaactttatgtccatgggcgcactcacagacctgggccaaaaccttctctacgccaactccgcccacgcgctagacatgacttttgaggtggatcccatggacgagcccacccttctttatgttttgtttgaagtctttgacgtggtccgtgtgcaccagccgcaccgcggcgtcatcgaaaccgtgtacctgcgcacgcccttctcggccggcaacgccacaacataaagaagcaagcaacatcaacaacagctgccgccatgggctccagtgagcaggaactgaaagccattgtcaaagatcttggttgtgggccatattttttgggcacctatgacaagcgctttccaggctttgtttctccacacaagctcgcctgcgccatagtcaatacggccggtcgcgagactgggggcgtacactggatggcctttgcctggaacccgcactcaaaaacatgctacctctttgagccctttggcttttctgaccagcgactcaagcaggtttaccagtttgagtacgagtcactcctgcgccgtagcgccattgcttcttcccccgaccgctgtataacgctggaaaagtccacccaaagcgtacaggggcccaactcggccgcctgtggactattctgctgcatgtttctccacgcctttgccaactggccccaaactcccatggatcacaaccccaccatgaaccttattaccggggtacccaactccatgctcaacagtccccaggtacagcccaccctgcgtcgcaaccaggaacagctctacagcttcctggagcgccactcgccctacttccgcagccacagtgcgcagattaggagcgccacttctttttgtcacttgaaaaacatgtaaaaataatgtactagagacactttcaataaaggcaaatgcttttatttgtacactctcgggtgattatttacccccacccttgccgtctgcgccgtttaaaaatcaaaggggttctgccgcgcatcgctatgcgccactggcagggacacgttgcgatactggtgtttagtgctccacttaaactcaggcacaaccatccgcggcagctcggtgaagttttcactccacaggctgcgcaccatcaccaacgcgtttagcaggtcgggcgccgatatcttgaagtcgcagttggggcctccgccctgcgcgcgcgagttgcgatacacagggttgcagcactggaacactatcagcgccgggtggtgcacgctggccagcacgctcttgtcggagatcagatccgcgtccaggtcctccgcgttgctcagggcgaacggagtcaactttggtagctgccttcccaaaaagggcgcgtgcccaggctttgagttgcactcgcaccgtagtggcatcaaaaggtgaccgtgcccggtctgggcgttaggatacagcgcctgcataaaagccttgatctgcttaaaagccacctgagcctttgcgccttcagagaagaacatgccgcaagacttgccggaaaactgattggccggacaggccgcgtcgtgcacgcagcaccttgcgtcggtgttggagatctgcaccacatttcggccccaccggttcttcacgatcttggccttgctagactgctccttcagcgcgcgctgcccgttttcgctcgtcacatccatttcaatcacgtgctccttatttatcataatgcttccgtgtagacacttaagctcgccttcgatctcagcgcagcggtgcagccacaacgcgcagcccgtgggctcgtgatgcttgtaggtcacctctgcaaacgactgcaggtacgcctgcaggaatcgccccatcatcgtcacaaaggtcttgttgctggtgaaggtcagctgcaacccgcggtgctcctcgttcagccaggtcttgcatacggccgccagagcttccacttggtcaggcagtagtttgaagttcgcctttagatcgttatccacgtggtacttgtccatcagcgcgcgcgcagcctccatgcccttctcccacgcagacacgatcggcacactcagcgggttcatcaccgtaatttcactttccgcttcgctgggctcttcctcttcctcttgcgtccgcataccacgcgccactgggtcgtcttcattcagccgccgcactgtgcgcttacctcctttgccatgcttgattagcaccggtgggttgctgaaacccaccatttgtagcgccacatcttctctttcttcctcgctgtccacgattacctctggtgatggcgggcgctcgggcttgggagaagggcgcttctttttcttcttgggcgcaatggccaaatccgccgccgaggtcgatggccgcgggctgggtgtgcgcggcaccagcgcgtcttgtgatgagtcttcctcgtcctcggactcgatacgccgcctcatccgcttttttgggggcgcccggggaggcggcggcgacggggacggggacgacacgtcctccatggttgggggacgtcgcgccgcaccgcgtccgcgctcgggggtggtttcgcgctgctcctcttcccgactggccatttccttctcctataggcagaaaaagatcatggagtcagtcgagaagaaggacagcctaaccgccccctctgagttcgccaccaccgcctccaccgatgccgccaacgcgcctaccaccttccccgtcgaggcacccccgcttgaggaggaggaagtgattatcgagcaggacccaggttttgtaagcgaagacgacgaggaccgctcagtaccaacagaggataaaaagcaagaccaggacaacgcagaggcaaacgaggaacaagtcgggcggggggacgaaaggcatggcgactacctagatgtgggagacgacgtgctgttgaagcatctgcagcgccagtgcgccattatctgcgacgcgttgcaagagcgcagcgatgtgcccctcgccatagcggatgtcagccttgcctacgaacgccacctattctcaccgcgcgtaccccccaaacgccaagaaaacggcacatgcgagcccaacccgcgcctcaacttctaccccgtatttgccgtgccagaggtgcttgccacctatcacatctttttccaaaactgcaagatacccctatcctgccgtgccaaccgcagccgagcggacaagcagctggccttgcggcagggcgctgtcatacctgatatcgcctcgctcaacgaagtgccaaaaatctttgagggtcttggacgcgacgagaagcgcgcggcaaacgctctgcaacaggaaaacagcgaaaatgaaagtcactctggagtgttggtggaactcgagggtgacaacgcgcgcctagccgtactaaaacgcagcatcgaggtcacccactttgcctacccggcacttaacctaccccccaaggtcatgagcacagtcatgagtgagctgatcgtgcgccgtgcgcagcccctggagagggatgcaaatttgcaagaacaaacagaggagggcctacccgcagttggcgacgagcagctagcgcgctggcttcaaacgcgcgagcctgccgacttggaggagcgacgcaaactaatgatggccgcagtgctcgttaccgtggagcttgagtgcatgcagcggttctttgctgacccggagatgcagcgcaagctagaggaaacattgcactacacctttcgacagggctacgtacgccaggcctgcaagatctccaacgtggagctctgcaacctggtctcctaccttggaattttgcacgaaaaccgccttgggcaaaacgtgcttcattccacgctcaagggcgaggcgcgccgcgactacgtccgcgactgcgtttacttatttctatgctacacctggcagacggccatgggcgtttggcagcagtgcttggaggagtgcaacctcaaggagctgcagaaactgctaaagcaaaacttgaaggacctatggacggccttcaacgagcgctccgtggccgcgcacctggcggacatcattttccccgaacgcctgcttaaaaccctgcaacagggtctgccagacttcaccagtcaaagcatgttgcagaactttaggaactttatcctagagcgctcaggaatcttgcccgccacctgctgtgcacttcctagcgactttgtgcccattaagtaccgcgaatgccctccgccgctttggggccactgctaccttctgcagctagccaactaccttgcctaccactctgacataatggaagacgtgagcggtgacggtctactggagtgtcactgtcgctgcaacctatgcaccccgcaccgctccctggtttgcaattcgcagctgcttaacgaaagtcaaattatcggtacctttgagctgcagggtccctcgcctgacgaaaagtccgcggctccggggttgaaactcactccggggctgtggacgtcggcttaccttcgcaaatttgtacctgaggactaccacgcccacgagattaggttctacgaagaccaatcccgcccgcctaatgcggagcttaccgcctgcgtcattacccagggccacattcttggccaattgcaagccatcaacaaagcccgccaagagtttctgctacgaaagggacggggggtttacttggacccccagtccggcgaggagctcaacccaatccccccgccgccgcagccctatcagcagcagccgcgggcccttgcttcccaggatggcacccaaaaagaagctgcagctgccgccgccacccacggacgaggaggaatactgggacagtcaggcagaggaggttttggacgaggaggaggaggacatgatggaagactgggagagcctagacgaggaagcttccgaggtcgaagaggtgtcagacgaaacaccgtcaccctcggtcgcattcccctcgccggcgccccagaaatcggcaaccggttccagcatggctacaacctccgctcctcaggcgccgccggcactgcccgttcgccgacccaaccgtagatgggacaccactggaaccagggccggtaagtccaagcagccgccgccgttagcccaagagcaacaacagcgccaaggctaccgctcatggcgcgggcacaagaacgccatagttgcttgcttgcaagactgtgggggcaacatctccttcgcccgccgctttcttctctaccatcacggcgtggccttcccccgtaacatcctgcattactaccgtcatctctacagcccatactgcaccggcggcagcggcagcaacagcagcggccacacagaagcaaaggcgaccggatagcaagactctgacaaagcccaagaaatccacagcggcggcagcagcaggaggaggagcgctgcgtctggcgcccaacgaacccgtatcgacccgcgagcttagaaacaggatttttcccactctgtatgctatatttcaacagagcaggggccaagaacaagagctgaaaataaaaaacaggtctctgcgatccctcacccgcagctgcctgtatcacaaaagcgaagatcagcttcggcgcacgctggaagacgcggaggctctcttcagtaaatactgcgcgctgactcttaaggactagtttcgcgccctttctcaaatttaagcgcgaaaactacgtcatctccagcggccacacccggcgccagcacctgttgtcagcgccattatgagcaaggaaattcccacgccctacatgtggagttaccagccacaaatgggacttgcggctggagctgcccaagactactcaacccgaataaactacatgagcgcgggaccccacatgatatcccgggtcaacggaatacgcgcccaccgaaaccgaattctcctggaacaggcggctattaccaccacacctcgtaataaccttaatccccgtagttggcccgctgccctggtgtaccaggaaagtcccgctcccaccactgtggtacttcccagagacgcccaggccgaagttcagatgactaactcaggggcgcagcttgcgggcggctttcgtcacagggtgcggtcgcccgggcagggtataactcacctgacaatcagagggcgaggtattcagctcaacgacgagtcggtgagctcctcgcttggtctccgtccggacgggacatttcagatcggcggcgccggccgctcttcattcacgcctcgtcaggcaatcctaactctgcagacctcgtcctctgagccgcgctctggaggcattggaactctgcaatttattgaggagtttgtgccatcggtctactttaaccccttctcgggacctcccggccactatccggatcaatttattcctaactttgacgcggtaaaggactcggcggacggctacgactgaatgttaagtggagaggcagagcaactgcgcctgaaacacctggtccactgtcgccgccacaagtgctttgcccgcgactccggtgagttttgctactttgaattgcccgaggatcatatcgagggcccggcgcacggcgtccggcttaccgcccagggagagcttgcccgtagcctgattcgggagtttacccagcgccccctgctagttgagcgggacaggggaccctgtgttctcactgtgatttgcaactgtcctaaccctggattacatcaagatcctctagttaatgtcaggtcgcctaagtcgattaactagagtacccggggatcttattccctttaactaataaaaaaaaataataaagcatcacttacttaaaatcagttagcaaatttctgtccagtttattcagcagcacctccttgccctcctcccagctctggtattgcagcttcctcctggctgcaaactttctccacaatctaaatggaatgtcagtttcctcctgttcctgtccatccgcacccactatcttcatgttgttgcagatgaagcgcgcaagaccgtctgaagataccttcaaccccgtgtatccatatgacacggaaaccggtcctccaactgtgccttttcttactcctccctttgtatcccccaatgggtttcaagagagtccccctggggtactctctttgcgcctatccgaacctctagttacctccaatggcatgcttgcgctcaaaatgggcaacggcctctctctggacgaggccggcaaccttacctcccaaaatgtaaccactgtgagcccacctctcaaaaaaaccaagtcaaacataaacctggaaatatctgcacccctcacagttacctcagaagccctaactgtggctgccgccgcacctctaatggtcgcgggcaacacactcaccatgcaatcacaggccccgctaaccgtgcacgactccaaacttagcattgccacccaaggacccctcacagtgtcagaaggaaagctagccctgcaaacatcaggccccctcaccaccaccgatagcagtacccttactatcactgcctcaccccctctaactactgccactggtagcttgggcattgacttgaaagagcccatttatacacaaaatggaaaactaggactaaagtacggggctcctttgcatgtaacagacgacctaaacactttgaccgtagcaactggtccaggtgtgactattaataatacttccttgcaaactaaagttactggagccttgggttttgattcacaaggcaatatgcaacttaatgtagcaggaggactaaggattgattctcaaaacagacgccttatacttgatgttagttatccgtttgatgctcaaaaccaactaaatctaagactaggacagggccctctttttataaactcagcccacaacttggatattaactacaacaaaggcctttacttgtttacagcttcaaacaattccaaaaagcttgaggttaacctaagcactgccaaggggttgatgtttgacgctacagccatagccattaatgcaggagatgggcttgaatttggttcacctaatgcaccaaacacaaatcccctcaaaacaaaaattggccatggcctagaatttgattcaaacaaggctatggttcctaaactaggaactggccttagttttgacagcacaggtgccattacagtaggaaacaaaaataatgataagctaactttgtggaccggaataaaccctccacctaactgtcaaattgtggaaaacactaatacaaatgatggcaaacttactttagtattagtaaaaaatggagggcttgttaatggctacgtgtctctagttggtgtatcagacactgtgaaccaaatgttcacacaaaagacagcaaacatccaattaagattatattttgactcttctggaaatctattaactgaggaatcagacttaaaaattccacttaaaaataaatcttctacagcgaccagtgaaactgtagccagcagcaaagcctttatgccaagtactacagcttatcccttcaacaccactactagggatagtgaaaactacattcatggaatatgttactacatgactagttatgatagaagtctatttcccttgaacatttctataatgctaaacagccgtatgatttcttccaatgttgcctatgccatacaatttgaatggaatctaaatgcaagtgaatctccagaaagcaacatagctacgctgaccacatccccctttttcttttcttacattacagaagacgacaactaaagaatcgtttgtgttatgtttcaacgtgtttatttttcaattgcagaaaatttcaagtcatttttcattcagtagtatagccccaccaccacatagcttatacagatcaccgtaccttaatcaaactcacagaaccctagtattcaacctgccacctccctcccaacacacagagtacacagtcctttctccccggctggccttaaaaagcatcatatcatgggtaacagacatattcttaggtgttatattccacacggtttcctgtcgagccaaacgctcatcagtgatattaataaactccccgggcagctcacttaagttcatgtcgctgtccagctgctgagccacaggctgctgtccaacttgcggttgcttaacgggcggcgaaggagaagtccacgctcagtgctgcagcagcgcgcgaataaactgctgccgccgccgctccgtcctgcaggaatacaacatggcagtggtctcctcagcgatgattcgcaccgcccgcagcataaggcgccttgtcctccgggcacagcagcgcaccctgatctcacttaaatcagcacagtaactgcagcacagcaccacaatattgttcaaaatcccacagtgcaaggcgctgtatccaaagctcatggcggggaccacagaacccacgtggccatcataccacaagcgcaggtagattaagtggcgacccctcataaacacgctggacataaacattacctcttttggcatgttgtaattcaccacctcccggtaccatataaacctctgattaaacatggcgccatccaccaccatcctaaaccagctggccaaaacctgcccgccggctatacactgcagggaaccgggactggaacaatgacagtggagagcccaggactcgtaaccatggatcatcatgctcgtcatgatatcaatgttggcacaacacaggcacacgtgcatacacttcctcaggattacaagctcctcccgcgttagaaccatatcccagggaacaacccattcctgaatcagcgtaaatcccacactgcagggaagacctcgcacgtaactcacgttgtgcattgtcaaagtgttacattcgggcagcagcggatgatcctccagtatggtagcgcgggtttctgtctcaaaaggaggtagacgatccctactgtacggagtgcgccgagacaaccgagatcgtgttggtcgtagtgtcatgccaaatggaacgccggacgtagtcatatttcctgaagcaaaaccaggtgcgggcgtgacaaacagatctgcgtctccggtctcgccgcttagatcgctctgtgtagtagttgtagtatatccactctctcaaagcatccaggcgccccctggcttcgggttctatgtaaactccttcatgcgccgctgccctgataacatccaccaccgcagaataagccacacccagccaacctacacattcgttctgcgagtcacacacgggaggagcgggaagagctggaagaaccatgtttttttttttattccaaaagattatccaaaacctcaaaatgaagatctattaagtgaacgcgctcccctccggtggcgtggtcaaactctacagccaaagaacagataatggcatttgtaagatgttgcacaatggcttccaaaaggcaaacggccctcacgtccaagtggacgtaaaggctaaacccttcagggtgaatctcctctataaacattccagcaccttcaaccatgcccaaataattctcatctcgccaccttctcaatatatctctaagcaaatcccgaatattaagtccggccattgtaaaaatctgctccagagcgccctccaccttcagcctcaagcagcgaatcatgattgcaaaaattcaggttcctcacagacctgtataagattcaaaagcggaacattaacaaaaataccgcgatcccgtaggtcccttcgcagggccagctgaacataatcgtgcaggtctgcacggaccagcgcggccacttccccgccaggaaccatgacaaaagaacccacactgattatgacacgcatactcggagctatgctaaccagcgtagccccgatgtaagcttgttgcatgggcggcgatataaaatgcaaggtgctgctcaaaaaatcaggcaaagcctcgcgcaaaaaagaaagcacatcgtagtcatgctcatgcagataaaggcaggtaagctccggaaccaccacagaaaaagacaccatttttctctcaaacatgtctgcgggtttctgcataaacacaaaataaaataacaaaaaaacatttaaacattagaagcctgtcttacaacaggaaaaacaacccttataagcataagacggactacggccatgccggcgtgaccgtaaaaaaactggtcaccgtgattaaaaagcaccaccgacagctcctcggtcatgtccggagtcataatgtaagactcggtaaacacatcaggttgattcacatcggtcagtgctaaaaagcgaccgaaatagcccgggggaatacatacccgcaggcgtagagacaacattacagcccccataggaggtataacaaaattaataggagagaaaaacacataaacacctgaaaaaccctcctgcctaggcaaaatagcaccctcccgctccagaacaacatacagcgcttccacagcggcagccataacagtcagccttaccagtaaaaaagaaaacctattaaaaaaacaccactcgacacggcaccagctcaatcagtcacagtgtaaaaaagggccaagtgcagagcgagtatatataggactaaaaaatgacgtaacggttaaagtccacaaaaaacacccagaaaaccgcacgcgaacctacgcccagaaacgaaagccaaaaaacccacaacttcctcaaatcgtcacttccgttttcccacgttacgtcacttcccattttaagaaaactacaattcccaacacatacaagttactccgccctaaaacctacgtcacccgccccgttcccacgccccgcgccacgtcacaaactccaccccctcattatcatattggcttcaatccaaaataaggtatattattgatgatg

SEQ ID NO: 44 - DNA, 36107 bp, Artificial Sequence
  Adk35RF-Spike/E4orf6(RSV)-E4dl-57(E4re#42)
ttaattaacatcatcaataatataccttattttggattgaagccaatatgataatgagggggtggagtttgtgacgtggcgcggggcgtgggaacggggcgggtgacgtagtagtgtggcggaagtgtgatgttgcaagtgtggcggaacacatgtaagcgacggatgtggcaaaagtgacgtttttggtgtgcgccggtgtacacaggaagtgacaattttcgcgcggttttaggcggatgttgtagtaaatttgggcgtaaccgagtaagatttggccattttcgcgggaaaactgaataagaggaagtgaaatctgaataattttgtgttactcatagcgcgtaataatttgatccgcgttaagatacattgatgagtttggacaaaccacaactagaatgcagtgaaaaaaatgctttatttgtgaaatttgtgatgctattgctttatttgtaaccattataagctgcaataaacaagttaacaacaacaattgcattcattttatgtttcaggttcagggggaggtgtgggaggttttttaaagcaagtaaaacctctacaaatgtggtatggctgattatgatcaattttcatggccacttgatgtattgttcatatttgcccagttcttggaggtcaatcagggactcattcaggttcttagccacctcattcagtctgtcaatctccttctggatgttcaccacagaggcattgatgccagagatgtctcccaggtccacatcagggctggtgtggttcttgaagtatttgtccagttcctccttgaaggagtccagttcaggttggagtgggtcatagactgtgttgttcacaatgccaatcaccacatcacagttgccagacacaaaggtgttgtctgtggtgataatctgtggttcatagaagttcctctgggtcacaaaccagtgggtgccattgctcacaaacactccctcccttggaaagtgagccttgccatcatggcagatggcaggggctgtggtgaagttcttctcctgggcaggcacataggtcacatgcaggaacaccactccatgaggggcagactgtggaaaactcatcaggtggtagcccttgccacagaagtccaccctcttgctttgtcccagcacacactcactcatcttggtggcagccaggttggcagatgccctaatctcagcagccctgataagttgttgggtcacataggtttggagggattggagtctgcctgtaatcagtctgtcaatctggacctcagcctccaccttgtccagtctgctcaggatgtcattcagcacagaggagatggctccaaagttgctggaaagttgcttcaccagggtgttcagagcctgggcattctggttcaccacatcttggagtttgcccagggcagaggctgtgctggacagggagtcctgaatcttgccaatggcagagttgaactggttggcaatcagtttctggttctcatagagcacattctgggtcactccaatgccattgaacctgtaagccatctgcatagcaaatgggatttggagggctgctcctgctccaaaggtccagccagaggtgatggtgccagccagcagggcagaggtgtattgggcaatcatctcatctgtcagcagtggaggcagcactgtcagtccattgaacttctgggcacaaatcaggtccctggcagcaatgtctcccagacagtctccatattgcttgatgaagccagcatcagccagggtcaccttgttgaacagcaggtcctcaatgaaggacctcttgcttggcttgcttgggtcaggcagaatctggctgaagttgaagcctccaaagtccttgattggaggtgtcttgtaaatctgcttcacctgggcaaacacctcctgggtgttcttgtcctgttccacagcaatgcctgtcagagccctgttaagttgggtacagaaggagccatattggagcagcaggttgctacactctgtgctgtctccacagatatacattgtacagtccacagaggtcttggtcatactcacaggcagaatctctgtggtcacagagatggtgaagttggttgggatggcaatgctgttgttgctgtaagccacagagttctctgctcccagactcattgtgtaggcaatgatgctctggcttgccacagacctcgacccaccgccaccggtctgggtctggtaggaggcacagatgcctgctccaattgggatgtcacactcataggagttgttcacatgctctgctccaatcagacagccagccctggtctggaacacattgctgcctgtgctgtagaccctccaggttggtgtaagttggtcagcatggatagccacaggcacctcagtacagttcacatcctggtagagcacagccacctggttgctggtgttggtgccaggtgtaatcacagacactcctccaaaggaacatggtgtgatgtccagaatctccaaggtctgtgggtccctcacagcatctgtggtgtcagcaatgtccctgccaaactgttggaatggcaggaacttcttgttgctctctgtcagcactcctgtgcctgtcagtccattgaagttgaagttcacacacttgttcttcaccaggttggtgctcttctttggtccacacactgtggcaggggcatggagcagttcaaaggacagcaccaccaccctgtatggttggtagcccactccattggttggttggaagccataggattggagtggaaagtaacagttgaagccctccactccattacatggtgtgctgccagcctggtaaatctctgtgctgatgtccctctcaaatggtttcaggttgctcttcctgaacagtctgtagaggtagttgtagttgcctcccaccttgctgtccaggttgttgctgttccaggcaatcacacagcctgtgaagtcatcaggcagtttgtagttgtagtcagcaatcttgcctgtttgtccaggggcaatctgtctcacctcatctcccctaatcacaaaggagtcagcatagacattggtgaaacacaggtcattcagtttggttgggctcactccataacacttgaaggtgctgaaggaggcagagttgtagagcacagagtagtcagccacacagttgctaatcctcttcctgttccaggcatagacagaggcaaacctggtggcattgaacacctctccaaatggacacaggttggtgatgtttggaaacctcacaatgctctctgttggttggaccctgaagttgctggtctggtagatgcccttctccactgtgaaggatttcagggtacacttggtctcagacagtgggtccagggcacagtccacagcatctgtgatggtgccattctcattgtatttcagcaggaaggtccttggttggaggtagcccacatagtaggctgctgctcctgctgtccagccagaggaggagtctccaggtgtcaggtaggacctgtgcagagccagcagggtctggaacctggtgatgttgatgccaattggcaggtccaccagtggttccaaggcagagaagccctgtggcaggtccctcaccaggttgattggtgtgtgtttgctgtaaatcttgaagtagccatcaatgttcttgaacacaaactccctcaggttcttgaagttgccctgcttgccctccaagtccatcaggaatggttggctcacatattcaaaggtacagttgttggcagaggagtagaccctgaactcagactccatccaggacttgttgttcttgtggtagtagactcccaggaatgggtcattacagaactggaactcacacaccttaatcaccacattggtggcattgttcacaatcagcagggactgggtcttgctgtccagggtggtgccaaaaatccagcccctgatgatgttgctcttctctgtgctggcaaagtagactccatcattgaatggcagcacagggttgtcaaacctcttggtgccattggtgccagacacatggatggcatggaaccaggtcacattgctgaagaatggcaggaacaggtcctgggtgctgtgcagcacagaggacctgaacaccttgtcagggtagtagactcccctggtgaaggagttggtgtaggcaggaggaagttgggtcctggtggtcaggttcacacactggctggacaccagtggcagcagcaccaggaacacaaacatggtggcaaatcggaggctggatcggtcccggtgtcttctatggaggtcaaaacagcgtggatggcgtctccaggcgatctgacggttcactaaacgagctcgtcgacgatctctatcactgatagggagatctctatcactgatagggagagctctgcttatatagacctcccaccgtacacgcctaccgcccatttgcgtcaatggggcggagttgttacgacattttggaaagtcccgttgattttggtgccaaaacaaactcccattgacgtcaatggggtggagacttggaaatccccgtgagtcaaaccgctatccacgcccattgatgtactgccaaaaccgcatcaccatggtaatagcgatgactaatacgtagatgtactgccaagtaggaaagtcccataaggtcatgtactgggcataatgccaggcgggccatttaccgtcattgacgtcaatagggggcgtacttggcatatgatacacttgatgtactgccaagtgggcagtttaccgtaaatactccacccattgacgtcaatggaaagtccctattggcgttactatgggaacatacgtcattattgacgtcaatgggcgggggtcgttgggcggtcagccaggcgggccatttaccgtaagttatgtaacgcggaactccatatatgggctatgaactaatgaccccgtaattgattactattacagtgtagtcttatgcaatactcttgtagtcttgcaacatggtaacgatgagttagcaacatgccttacaaggagagaaaaagcaccgtgcatgccgattggtggaagtaaggtggtacgatcgtgccttattaggaaggcaacagacgggtctgacatggattggacgaaccactgaattgccgcattgcagagatattgtatttaagtgcctagctcgatacataaacaaactaccccaagctggccaccatgactacgtccggcgttccatttggcatgacactacgaccaacacgatctcggttgtctcggcgcactccgtacagtagggatcgtctacctccttttgagacagaaacccgcgctaccatactggaggatcatccgctgctgcccgaatgtaacactttgacaatgcacaacgtgagttacgtgcgaggtcttccctgcagtgtgggatttacgctgattcaggaatgggttgttccctgggatatggttctaacgcgggaggagcttgtaatcctgaggaagtgtatgcacgtgtgcctgtgttgtgccaacattgatatcatgacgagcatgatgatccatggttacgagtcctgggctctccactgtcattgttccagtcccggttccctgcagtgtatagccggcgggcaggttttggccagctggtttaggatggtggtggatggcgccatgtttaatcagaggtttatatggtaccgggaggtggtgaattacaacatgccaaaagaggtaatgtttatgtccagcgtgtttatgaggggtcgccacttaatctacctgcgcttgtggtatgatggccacgtgggttctgtggtccccgccatgagctttggatacagcgccttgcactgtgggattttgaacaatattgtggtgctgtgctgcagttactgtgctgatttaagtgagatcagggtgcgctgctgtgcccggaggacaaggcgccttatgctgcgggcggtgcgaatcatcgctgaggagaccactgccatgttgtattcctgcaggacggagcggcggcggcagcagtttattcgcgcgctgctgcagcaccaccgccctatcctgatgcacgattatgactctacccccatgtagaagcttggggatcaattctctagagctcgctgatcagcctcgactgtgccttctagttgccagccatctgttgtttgcccctcccccgtgccttccttgaccctggaaggtgccactcccactgtcctttcctaataaaatgaggaaattgcatcgcattgtctgagtaggtgtcattctattctggggggtggggtggggcaggacagcaagggggaggattgggaagacaatagcaggcatgctggggatgcggtgggctctatggcttctgaggaaattgggcgtggcttaagggtgggaaagaatatataaggtgggggtcttatgtagttttgtatctgttttgcagcagccgccgccgccatgagcaccaactcgtttgatggaagcattgtgagctcatatttgacaacgcgcatgcccccatgggccggggtgcgtcagaatgtgatgggctccagcattgatggtcgccccgtcctgcccgcaaactctactaccttgacctacgagaccgtgtctggaacgccgttggagactgcagcctccgccgccgcttcagccgctgcagccaccgcccgcgggattgtgactgactttgctttcctgagcccgcttgcaagcagtgcagcttcccgttcatccgcccgcgatgacaagttgacggctcttttggcacaattggattctttgacccgggaacttaatgtcgtttctcagcagctgttggatctgcgccagcaggtttctgccctgaaggcttcctcccctcccaatgcggtttaaaacataaataaaaaaccagactctgtttggatttggatcaagcaagtgtcttgctgtctttatttaggggttttgcgcgcgcggtaggcccgggaccagcggtctcggtcgttgagggtcctgtgtattttttccaggacgtggtaaaggtgactctggatgttcagatacatgggcataagcccgtctctggggtggaggtagcaccactgcagagcttcatgctgcggggtggtgttgtagatgatccagtcgtagcaggagcgctgggcgtggtgcctaaaaatgtctttcagtagcaagctgattgccaggggcaggcccttggtgtaagtgtttacaaagcggttaagctgggatgggtgcatacgtggggatatgagatgcatcttggactgtatttttaggttggctatgttcccagccatatccctccggggattcatgttgtgcagaaccaccagcacagtgtatccggtgcacttgggaaatttgtcatgtagcttagaaggaaatgcgtggaagaacttggagacgcccttgtgacctccaagattttccatgcattcgtccataatgatggcaatgggcccacgggcggcggcctgggcgaagatatttctgggatcactaacgtcatagttgtgttccaggatgagatcgtcataggccatttttacaaagcgcgggcggagggtgccagactgcggtataatggttccatccggcccaggggcgtagttaccctcacagatttgcatttcccacgctttgagttcagatggggggatcatgtctacctgcggggcgatgaagaaaacggtttccggggtaggggagatcagctgggaagaaagcaggttcctgagcagctgcgacttaccgcagccggtgggcccgtaaatcacacctattaccggctgcaactggtagttaagagagctgcagctgccgtcatccctgagcaggggggccacttcgttaagcatgtccctgactcgcatgttttccctgaccaaatccgccagaaggcgctcgccgcccagcgatagcagttcttgcaaggaagcaaagtttttcaacggtttgagaccgtccgccgtaggcatgcttttgagcgtttgaccaagcagttccaggcggtcccacagctcggtcacctgctctacggcatctcgatccagcatatctcctcgtttcgcgggttggggcggctttcgctgtacggcagtagtcggtgctcgtccagacgggccagggtcatgtctttccacgggcgcagggtcctcgtcagcgtagtctgggtcacggtgaaggggtgcgctccgggctgcgcgctggccagggtgcgcttgaggctggtcctgctggtgctgaagcgctgccggtcttcgccctgcgcgtcggccaggtagcatttgaccatggtgtcatagtccagcccctccgcggcgtggcccttggcgcgcagcttgcccttggaggaggcgccgcacgaggggcagtgcagacttttgagggcgtagagcttgggcgcgagaaataccgattccggggagtaggcatccgcgccgcaggccccgcagacggtctcgcattccacgagccaggtgagctctggccgttcggggtcaaaaaccaggtttcccccatgctttttgatgcgtttcttacctctggtttccatgagccggtgtccacgctcggtgacgaaaaggctgtccgtgtccccgtatacagacttgagaggcctgtcctcgagcggtgttccgcggtcctcctcgtatagaaactcggaccactctgagacaaaggctcgcgtccaggccagcacgaaggaggctaagtgggaggggtagcggtcgttgtccactagggggtccactcgctccagggtgtgaagacacatgtcgccctcttcggcatcaaggaaggtgattggtttgtaggtgtaggccacgtgaccgggtgttcctgaaggggggctataaaagggggtgggggcgcgttcgtcctcactctcttccgcatcgctgtctgcgagggccagctgttggggtgagtactccctctgaaaagcgggcatgacttctgcgctaagattgtcagtttccaaaaacgaggaggatttgatattcacctggcccgcggtgatgcctttgagggtggccgcatccatctggtcagaaaagacaatctttttgttgtcaagcttggtggcaaacgacccgtagagggcgttggacagcaacttggcgatggagcgcagggtttggtttttgtcgcgatcggcgcgctccttggccgcgatgtttagctgcacgtattcgcgcgcaacgcaccgccattcgggaaagacggtggtgcgctcgtcgggcaccaggtgcacgcgccaaccgcggttgtgcagggtgacaaggtcaacgctggtggctacctctccgcgtaggcgctcgttggtccagcagaggcggccgcccttgcgcgagcagaatggcggtagggggtctagctgcgtctcgtccggggggtctgcgtccacggtaaagaccccgggcagcaggcgcgcgtcgaagtagtctatcttgcatccttgcaagtctagcgcctgctgccatgcgcgggcggcaagcgcgcgctcgtatgggttgagtgggggaccccatggcatggggtgggtgagcgcggaggcgtacatgccgcaaatgtcgtaaacgtagaggggctctctgagtattccaagatatgtagggtagcatcttccaccgcggatgctggcgcgcacgtaatcgtatagttcgtgcgagggagcgaggaggtcgggaccgaggttgctacgggcgggctgctctgctcggaagactatctgcctgaagatggcatgtgagttggatgatatggttggacgctggaagacgttgaagctggcgtctgtgagacctaccgcgtcacgcacgaaggaggcgtaggagtcgcgcagcttgttgaccagctcggcggtgacctgcacgtctagggcgcagtagtccagggtttccttgatgatgtcatacttatcctgtcccttttttttccacagctcgcggttgaggacaaactcttcgcggtctttccagtactcttggatcggaaacccgtcggcctccgaacggtaagagcctagcatgtagaactggttgacggcctggtaggcgcagcatcccttttctacgggtagcgcgtatgcctgcgcggccttccggagcgaggtgtgggtgagcgcaaaggtgtccctgaccatgactttgaggtactggtatttgaagtcagtgtcgtcgcatccgccctgctcccagagcaaaaagtccgtgcgctttttggaacgcggatttggcagggcgaaggtgacatcgttgaagagtatctttcccgcgcgaggcataaagttgcgtgtgatgcggaagggtcccggcacctcggaacggttgttaattacctgggcggcgagcacgatctcgtcaaagccgttgatgttgtggcccacaatgtaaagttccaagaagcgcgggatgcccttgatggaaggcaattttttaagttcctcgtaggtgagctcttcaggggagctgagcccgtgctctgaaagggcccagtctgcaagatgagggttggaagcgacgaatgagctccacaggtcacgggccattagcatttgcaggtggtcgcgaaaggtcctaaactggcgacctatggccattttttctggggtgatgcagtagaaggtaagcgggtcttgttcccagcggtcccatccaaggttcgcggctaggtctcgcgcggcagtcactagaggctcatctccgccgaacttcatgaccagcatgaagggcacgagctgcttcccaaaggcccccatccaagtataggtctctacatcgtaggtgacaaagagacgctcggtgcgaggatgcgagccgatcgggaagaactggatctcccgccaccaattggaggagtggctattgatgtggtgaaagtagaagtccctgcgacgggccgaacactcgtgctggcttttgtaaaaacgtgcgcagtactggcagcggtgcacgggctgtacatcctgcacgaggttgacctgacgaccgcgcacaaggaagcagagtgggaatttgagcccctcgcctggcgggtttggctggtggtcttctacttcggctgcttgtccttgaccgtctggctgctcgaggggagttacggtggatcggaccaccacgccgcgcgagcccaaagtccagatgtccgcgcgcggcggtcggagcttgatgacaacatcgcgcagatgggagctgtccatggtctggagctcccgcggcgtcaggtcaggcgggagctcctgcaggtttacctcgcatagacgggtcagggcgcgggctagatccaggtgatacctaatttccaggggctggttggtggcggcgtcgatggcttgcaagaggccgcatccccgcggcgcgactacggtaccgcgcggcgggcggtgggccgcgggggtgtccttggatgatgcatctaaaagcggtgacgcgggcgagcccccggaggtagggggggctccggacccgccgggagagggggcaggggcacgtcggcgccgcgcgcgggcaggagctggtgctgcgcgcgtaggttgctggcgaacgcgacgacgcggcggttgatctcctgaatctggcgcctctgcgtgaagacgacgggcccggtgagcttgaacctgaaagagagttcgacagaatcaatttcggtgtcgttgacggcggcctggcgcaaaatctcctgcacgtctcctgagttgtcttgataggcgatctcggccatgaactgctcgatctcttcctcctggagatctccgcgtccggctcgctccacggtggcggcgaggtcgttggaaatgcgggccatgagctgcgagaaggcgttgaggcctccctcgttccagacgcggctgtagaccacgcccccttcggcatcgcgggcgcgcatgaccacctgcgcgagattgagctccacgtgccgggcgaagacggcgtagtttcgcaggcgctgaaagaggtagttgagggtggtggcggtgtgttctgccacgaagaagtacataacccagcgtcgcaacgtggattcgttgatatcccccaaggcctcaaggcgctccatggcctcgtagaagtccacggcgaagttgaaaaactgggagttgcgcgccgacacggttaactcctcctccagaagacggatgagctcggcgacagtgtcgcgcacctcgcgctcaaaggctacaggggcctcttcttcttcttcaatctcctcttccataagggcctccccttcttcttcttctggcggcggtgggggaggggggacacggcggcgacgacggcgcaccgggaggcggtcgacaaagcgctcgatcatctccccgcggcgacggcgcatggtctcggtgacggcgcggccgttctcgcgggggcgcagttggaagacgccgcccgtcatgtcccggttatgggttggcggggggctgccatgcggcagggatacggcgctaacgatgcatctcaacaattgttgtgtaggtactccgccgccgagggacctgagcgagtccgcatcgaccggatcggaaaacctctcgagaaaggcgtctaaccagtcacagtcgcaaggtaggctgagcaccgtggcgggcggcagcgggcggcggtcggggttgtttctggcggaggtgctgctgatgatgtaattaaagtaggcggtcttgagacggcggatggtcgacagaagcaccatgtccttgggtccggcctgctgaatgcgcaggcggtcggccatgccccaggcttcgttttgacatcggcgcaggtctttgtagtagtcttgcatgagcctttctaccggcacttcttcttctccttcctcttgtcctgcatctcttgcatctatcgctgcggcggcggcggagtttggccgtaggtggcgccctcttcctcccatgcgtgtgaccccgaagcccctcatcggctgaagcagggctaggtcggcgacaacgcgctcggctaatatggcctgctgcacctgcgtgagggtagactggaagtcatccatgtccacaaagcggtggtatgcgcccgtgttgatggtgtaagtgcagttggccataacggaccagttaacggtctggtgacccggctgcgagagctcggtgtacctgagacgcgagtaagccctcgagtcaaatacgtagtcgttgcaagtccgcaccaggtactggtatcccaccaaaaagtgcggcggcggctggcggtagaggggccagcgtagggtggccggggctccgggggcgagatcttccaacataaggcgatgatatccgtagatgtacctggacatccaggtgatgccggcggcggtggtggaggcgcgcggaaagtcgcggacgcggttccagatgttgcgcagcggcaaaaagtgctccatggtcgggacgctctggccggtcaggcgcgcgcaatcgttgacgctctagcgtgcaaaaggagagcctgtaagcgggcactcttccgtggtctggtggataaattcgcaagggtatcatggcggacgaccggggttcgagccccgtatccggccgtccgccgtgatccatgcggttaccgcccgcgtgtcgaacccaggtgtgcgacgtcagacaacgggggagtgctccttttggcttccttccaggcgcggcggctgctgcgctagcttttttggccactggccgcgcgcagcgtaagcggttaggctggaaagcgaaagcattaagtggctcgctccctgtagccggagggttattttccaagggttgagtcgcgggacccccggttcgagtctcggaccggccggactgcggcgaacgggggtttgcctccccgtcatgcaagaccccgcttgcaaattcctccggaaacagggacgagccccttttttgcttttcccagatgcatccggtgctgcggcagatgcgcccccctcctcagcagcggcaagagcaagagcagcggcagacatgcagggcaccctcccctcctcctaccgcgtcaggaggggcgacatccgcggttgacgcggcagcagatggtgattacgaacccccgcggcgccgggcccggcactacctggacttggaggagggcgagggcctggcgcggctaggagcgccctctcctgagcggcacccaagggtgcagctgaagcgtgatacgcgtgaggcgtacgtgccgcggcagaacctgtttcgcgaccgcgagggagaggagcccgaggagatgcgggatcgaaagttccacgcagggcgcgagctgcggcatggcctgaatcgcgagcggttgctgcgcgaggaggactttgagcccgacgcgcgaaccgggattagtcccgcgcgcgcacacgtggcggccgccgacctggtaaccgcatacgagcagacggtgaaccaggagattaactttcaaaaaagctttaacaaccacgtgcgtacgcttgtggcgcgcgaggaggtggctataggactgatgcatctgtgggactttgtaagcgcgctggagcaaaacccaaatagcaagccgctcatggcgcagctgttccttatagtgcagcacagcagggacaacgaggcattcagggatgcgctgctaaacatagtagagcccgagggccgctggctgctcgatttgataaacatcctgcagagcatagtggtgcaggagcgcagcttgagcctggctgacaaggtggccgccatcaactattccatgcttagcctgggcaagttttacgcccgcaagatataccataccccttacgttcccatagacaaggaggtaaagatcgaggggttctacatgcgcatggcgctgaaggtgcttaccttgagcgacgacctgggcgtttatcgcaacgagcgcatccacaaggccgtgagcgtgagccggcggcgcgagctcagcgaccgcgagctgatgcacagcctgcaaagggccctggctggcacgggcagcggcgatagagaggccgagtcctactttgacgcgggcgctgacctgcgctgggccccaagccgacgcgccctggaggcagctggggccggacctgggctggcggtggcacccgcgcgcgctggcaacgtcggcggcgtggaggaatatgacgaggacgatgagtacgagccagaggacggcgagtactaagcggtgatgtttctgatcagatgatgcaagacgcaacggacccggcggtgcgggcggcgctgcagagccagccgtccggccttaactccacggacgactggcgccaggtcatggaccgcatcatgtcgctgactgcgcgcaatcctgacgcgttccggcagcagccgcaggccaaccggctctccgcaattctggaagcggtggtcccggcgcgcgcaaaccccacgcacgagaaggtgctggcgatcgtaaacgcgctggccgaaaacagggccatccggcccgacgaggccggcctggtctacgacgcgctgcttcagcgcgtggctcgttacaacagcggcaacgtgcagaccaacctggaccggctggtgggggatgtgcgcgaggccgtggcgcagcgtgagcgcgcgcagcagcagggcaacctgggctccatggttgcactaaacgccttcctgagtacacagcccgccaacgtgccgcggggacaggaggactacaccaactttgtgagcgcactgcggctaatggtgactgagacaccgcaaagtgaggtgtaccagtctgggccagactattttttccagaccagtagacaaggcctgcagaccgtaaacctgagccaggctttcaaaaacttgcaggggctgtggggggtgcgggctcccacaggcgaccgcgcgaccgtgtctagcttgctgacgcccaactcgcgcctgttgctgctgctaatagcgcccttcacggacagtggcagcgtgtcccgggacacatacctaggtcacttgctgacactgtaccgcgaggccataggtcaggcgcatgtggacgagcatactttccaggagattacaagtgtcagccgcgcgctggggcaggaggacacgggcagcctggaggcaaccctaaactacctgctgaccaaccggcggcagaagatcccctcgttgcacagtttaaacagcgaggaggagcgcattttgcgctacgtgcagcagagcgtgagccttaacctgatgcgcgacggggtaacgcccagcgtggcgctggacatgaccgcgcgcaacatggaaccgggcatgtatgcctcaaaccggccgtttatcaaccgcctaatggactacttgcatcgcgcggccgccgtgaaccccgagtatttcaccaatgccatcttgaacccgcactggctaccgccccctggtttctacaccgggggattcgaggtgcccgagggtaacgatggattcctctgggacgacatagacgacagcgtgttttccccgcaaccgcagaccctgctagagttgcaacagcgcgagcaggcagaggcggcgctgcgaaaggaaagcttccgcaggccaagcagcttgtccgatctaggcgctgcggccccgcggtcagatgctagtagcccatttccaagcttgatagggtctcttaccagcactcgcaccacccgcccgcgcctgctgggcgaggaggagtacctaaacaactcgctgctgcagccgcagcgcgaaaaaaacctgcctccggcatttcccaacaacgggatagagagcctagtggacaagatgagtagatggaagacgtacgcgcaggagcacagggacgtgccaggcccgcgcccgcccacccgtcgtcaaaggcacgaccgtcagcggggtctggtgtgggaggacgatgactcggcagacgacagcagcgtcctggatttgggagggagtggcaacccgtttgcgcaccttcgccccaggctggggagaatgttttaaaaaaaaaaaagcatgatgcaaaataaaaaactcaccaaggccatggcaccgagcgttggttttcttgtattccccttagtatgcggcgcgcggcgatgtatgaggaaggtcctcctccctcctacgagagtgtggtgagcgcggcgccagtggcggcggcgctgggttctcccttcgatgctcccctggacccgccgtttgtgcctccgcggtacctgcggcctaccggggggagaaacagcatccgttactctgagttggcacccctattcgacaccacccgtgtgtacctggtggacaacaagtcaacggatgtggcatccctgaactaccagaacgaccacagcaactttctgaccacggtcattcaaaacaatgactacagcccgggggaggcaagcacacagaccatcaatcttgacgaccggtcgcactggggcggcgacctgaaaaccatcctgcataccaacatgccaaatgtgaacgagttcatgtttaccaataagtttaaggcgcgggtgatggtgtcgcgcttgcctactaaggacaatcaggtggagctgaaatacgagtgggtggagttcacgctgcccgagggcaactactccgagaccatgaccatagaccttatgaacaacgcgatcgtggagcactacttgaaagtgggcagacagaacggggttctggaaagcgacatcggggtaaagtttgacacccgcaacttcagactggggtttgaccccgtcactggtcttgtcatgcctggggtatatacaaacgaagccttccatccagacatcattttgctgccaggatgcggggtggacttcacccacagccgcctgagcaacttgttgggcatccgcaagcggcaacccttccaggagggctttaggatcacctacgatgatctggagggtggtaacattcccgcactgttggatgtggacgcctaccaggcgagcttgaaagatgacaccgaacagggcgggggtggcgcaggcggcagcaacagcagtggcagcggcgcggaagagaactccaacgcggcagccgcggcaatgcagccggtggaggacatgaacgatcatgccattcgcggcgacacctttgccacacgggctgaggagaagcgcgctgaggccgaagcagcggccgaagctgccgcccccgctgcgcaacccgaggtcgagaagcctcagaagaaaccggtgatcaaacccctgacagaggacagcaagaaacgcagttacaacctaataagcaatgacagcaccttcacccagtaccgcagctggtaccttgcatacaactacggcgaccctcagaccggaatccgctcatggaccctgctttgcactcctgacgtaacctgcggctcggagcaggtctactggtcgttgccagacatgatgcaagaccccgtgaccttccgctccacgcgccagatcagcaactttccggtggtgggcgccgagctgttgcccgtgcactccaagagcttctacaacgaccaggccgtctactcccaactcatccgccagtttacctctctgacccacgtgttcaatcgctttcccgagaaccagattttggcgcgcccgccagcccccaccatcaccaccgtcagtgaaaacgttcctgctctcacagatcacgggacgctaccgctgcgcaacagcatcggaggagtccagcgagtgaccattactgacgccagacgccgcacctgcccctacgtttacaaggccctgggcatagtctcgccgcgcgtcctatcgagccgcactttttgagcaagcatgtccatccttatatcgcccagcaataacacaggctggggcctgcgcttcccaagcaagatgtttggcggggccaagaagcgctccgaccaacacccagtgcgcgtgcgcgggcactaccgcgcgccctggggcgcgcacaaacgcggccgcactgggcgcaccaccgtcgatgacgccatcgacgcggtggtggaggaggcgcgcaactacacgcccacgccgccaccagtgtccacagtggacgcggccattcagaccgtggtgcgcggagcccggcgctatgctaaaatgaagagacggcggaggcgcgtagcacgtcgccaccgccgccgacccggcactgccgcccaacgcgcggcggcggccctgcttaaccgcgcacgtcgcaccggccgacgggcggccatgcgggccgctcgaaggctggccgcgggtattgtcactgtgccccccaggtccaggcgacgagcggccgccgcagcagccgcggccattagtgctatgactcagggtcgcaggggcaacgtgtattgggtgcgcgactcggttagcggcctgcgcgtgcccgtgcgcacccgccccccgcgcaactagattgcaagaaaaaactacttagactcgtactgttgtatgtatccagcggcggcggcgcgcaacgaagctatgtccaagcgcaaaatcaaagaagagatgctccaggtcatcgcgccggagatctatggccccccgaagaaggaagagcaggattacaagccccgaaagctaaagcgggtcaaaaagaaaaagaaagatgatgatgatgaacttgacgacgaggtggaactgctgcacgctaccgcgcccaggcgacgggtacagtggaaaggtcgacgcgtaaaacgtgttttgcgacccggcaccaccgtagtctttacgcccggtgagcgctccacccgcacctacaagcgcgtgtatgatgaggtgtacggcgacgaggacctgcttgagcaggccaacgagcgcctcggggagtttgcctacggaaagcggcataaggacatgctggcgttgccgctggacgagggcaacccaacacctagcctaaagcccgtaacactgcagcaggtgctgcccgcgcttgcaccgtccgaagaaaagcgcggcctaaagcgcgagtctggtgacttggcacccaccgtgcagctgatggtacccaagcgccagcgactggaagatgtcttggaaaaaatgaccgtggaacctgggctggagcccgaggtccgcgtgcggccaatcaagcaggtggcgccgggactgggcgtgcagaccgtggacgttcagatacccactaccagtagcaccagtattgccaccgccacagagggcatggagacacaaacgtccccggttgcctcagcggtggcggatgccgcggtgcaggcggtcgctgcggccgcgtccaagacctctacggaggtgcaaacggacccgtggatgtttcgcgtttcagccccccggcgcccgcgccgttcgaggaagtacggcgccgccagcgcgctactgcccgaatatgccctacatccttccattgcgcctacccccggctatcgtggctacacctaccgccccagaagacgagcaactacccgacgccgaaccaccactggaacccgccgccgccgtcgccgtcgccagcccgtgctggccccgatttccgtgcgcagggtggctcgcgaaggaggcaggaccctggtgctgccaacagcgcgctaccaccccagcatcgtttaaaagccggtctttgtggttcttgcagatatggccctcacctgccgcctccgtttcccggtgccgggattccgaggaagaatgcaccgtaggaggggcatggccggccacggcctgacgggcggcatgcgtcgtgcgcaccaccggcggcggcgcgcgtcgcaccgtcgcatgcgcggcggtatcctgcccctccttattccactgatcgccgcggcgattggcgccgtgcccggaattgcatccgtggccttgcaggcgcagagacactgattaaaaacaagttgcatgtggaaaaatcaaaataaaaagtctggactctcacgctcgcttggtcctgtaactattttgtagaatggaagacatcaactttgcgtctctggccccgcgacacggctcgcgcccgttcatgggaaactggcaagatatcggcaccagcaatatgagcggtggcgccttcagctggggctcgctgtggagcggcattaaaaatttcggttccaccgttaagaactatggcagcaaggcctggaacagcagcacaggccagatgctgagggataagttgaaagagcaaaatttccaacaaaaggtggtagatggcctggcctctggcattagcggggtggtggacctggccaaccaggcagtgcaaaataagattaacagtaagcttgatccccgccctcccgtagaggagcctccaccggccgtggagacagtgtctccagaggggcgtggcgaaaagcgtccgcgccccgacagggaagaaactctggtgacgcaaatagacgagcctccctcgtacgaggaggcactaaagcaaggcctgcccaccacccgtcccatcgcgcccatggctaccggagtgctgggccagcacacacccgtaacgctggacctgcctccccccgccgacacccagcagaaacctgtgctgccaggcccgaccgccgttgttgtaacccgtcctagccgcgcgtccctgcgccgcgccgccagcggtccgcgatcgttgcggcccgtagccagtggcaactggcaaagcacactgaacagcatcgtgggtctgggggtgcaatccctgaagcgccgacgatgcttctgatagctaacgtgtcgtatgtgtgtcatgtatgcgtccatgtcgccgccagaggagctgctgagccgccgcgcgcccgctttccaagatggctaccccttcgatgatgccgcagtggtcttacatgcacatctcgggccaggacgcctcggagtacctgagccccgggctggtgcagtttgcccgcgccaccgagacgtacttcagcctgaataacaagtttagaaaccccacggtggcgcctacgcacgacgtgaccacagaccggtcccagcgtttgacgctgcggttcatccctgtggaccgtgaggatactgcgtactcgtacaaggcgcggttcaccctagctgtgggtgataaccgtgtgctggacatggcttccacgtactttgacatccgcggcgtgctggacaggggccctacttttaagccctactctggcactgcctacaacgccctggctcccaagggtgccccaaatccttgcgaatgggatgaagctgctactgctcttgaaataaacctagaagaagaggacgatgacaacgaagacgaagtagacgagcaagctgagcagcaaaaaactcacgtatttgggcaggcgccttattctggtataaatattacaaaggagggtattcaaataggtgtcgaaggtcaaacacctaaatatgccgataaaacatttcaacctgaacctcaaataggagaatctcagtggtacgaaacagaaattaatcatgcagctgggagagtcctaaaaaagactaccccaatgaaaccatgttacggttcatatgcaaaacccacaaatgaaaatggagggcaaggcattcttgtaaagcaacaaaatggaaagctagaaagtcaagtggaaatgcaatttttctcaactactgaggcagccgcaggcaatggtgataacttgactcctaaagtggtattgtacagtgaagatgtagatatagaaaccccagacactcatatttcttacatgcccactattaaggaaggtaactcacgagaactaatgggccaacaatctatgcccaacaggcctaattacattgcttttagggacaattttattggtctaatgtattacaacagcacgggtaatatgggtgttctggcgggccaagcatcgcagttgaatgctgttgtagatttgcaagacagaaacacagagctttcataccagcttttgcttgattccattggtgatagaaccaggtacttttctatgtggaatcaggctgttgacagctatgatccagatgttagaattattgaaaatcatggaactgaagatgaacttccaaattactgctttccactgggaggtgtgattaatacagagactcttaccaaggtaaaacctaaaacaggtcaggaaaatggatgggaaaaagatgctacagaattttcagataaaaatgaaataagagttggaaataattttgccatggaaatcaatctaaatgccaacctgtggagaaatttcctgtactccaacatagcgctgtatttgcccgacaagctaaagtacagtccttccaacgtaaaaatttctgataacccaaacacctacgactacatgaacaagcgagtggtggctcccgggctagtggactgctacattaaccttggagcacgctggtcccttgactatatggacaacgtcaacccatttaaccaccaccgcaatgctggcctgcgctaccgctcaatgttgctgggcaatggtcgctatgtgcccttccacatccaggtgcctcagaagttctttgccattaaaaacctccttctcctgccgggctcatacacctacgagtggaacttcaggaaggatgttaacatggttctgcagagctccctaggaaatgacctaagggttgacggagccagcattaagtttgatagcatttgcctttacgccaccttcttccccatggcccacaacaccgcctccacgcttgaggccatgcttagaaacgacaccaacgaccagtcctttaacgactatctctccgccgccaacatgctctaccctatacccgccaacgctaccaacgtgcccatatccatcccctcccgcaactgggcggctttccgcggctgggccttcacgcgccttaagactaaggaaaccccatcactgggctcgggctacgacccttattacacctactctggctctataccctacctagatggaaccttttacctcaaccacacctttaagaaggtggccattacctttgactcttctgtcagctggcctggcaatgaccgcctgcttacccccaacgagtttgaaattaagcgctcagttgacggggagggttacaacgttgcccagtgtaacatgaccaaagactggttcctggtacaaatgctagctaactataacattggctaccagggcttctatatcccagagagctacaaggaccgcatgtactccttctttagaaacttccagcccatgagccgtcaggtggtggatgatactaaatacaaggactaccaacaggtgggcatcctacaccaacacaacaactctggatttgttggctaccttgcccccaccatgcgcgaaggacaggcctaccctgctaacttcccctatccgcttataggcaagaccgcagttgacagcattacccagaaaaagtttctttgcgatcgcaccctttggcgcatcccattctccagtaactttatgtccatgggcgcactcacagacctgggccaaaaccttctctacgccaactccgcccacgcgctagacatgacttttgaggtggatcccatggacgagcccacccttctttatgttttgtttgaagtctttgacgtggtccgtgtgcaccagccgcaccgcggcgtcatcgaaaccgtgtacctgcgcacgcccttctcggccggcaacgccacaacataaagaagcaagcaacatcaacaacagctgccgccatgggctccagtgagcaggaactgaaagccattgtcaaagatcttggttgtgggccatattttttgggcacctatgacaagcgctttccaggctttgtttctccacacaagctcgcctgcgccatagtcaatacggccggtcgcgagactgggggcgtacactggatggcctttgcctggaacccgcactcaaaaacatgctacctctttgagccctttggcttttctgaccagcgactcaagcaggtttaccagtttgagtacgagtcactcctgcgccgtagcgccattgcttcttcccccgaccgctgtataacgctggaaaagtccacccaaagcgtacaggggcccaactcggccgcctgtggactattctgctgcatgtttctccacgcctttgccaactggccccaaactcccatggatcacaaccccaccatgaaccttattaccggggtacccaactccatgctcaacagtccccaggtacagcccaccctgcgtcgcaaccaggaacagctctacagcttcctggagcgccactcgccctacttccgcagccacagtgcgcagattaggagcgccacttctttttgtcacttgaaaaacatgtaaaaataatgtactagagacactttcaataaaggcaaatgcttttatttgtacactctcgggtgattatttacccccacccttgccgtctgcgccgtttaaaaatcaaaggggttctgccgcgcatcgctatgcgccactggcagggacacgttgcgatactggtgtttagtgctccacttaaactcaggcacaaccatccgcggcagctcggtgaagttttcactccacaggctgcgcaccatcaccaacgcgtttagcaggtcgggcgccgatatcttgaagtcgcagttggggcctccgccctgcgcgcgcgagttgcgatacacagggttgcagcactggaacactatcagcgccgggtggtgcacgctggccagcacgctcttgtcggagatcagatccgcgtccaggtcctccgcgttgctcagggcgaacggagtcaactttggtagctgccttcccaaaaagggcgcgtgcccaggctttgagttgcactcgcaccgtagtggcatcaaaaggtgaccgtgcccggtctgggcgttaggatacagcgcctgcataaaagccttgatctgcttaaaagccacctgagcctttgcgccttcagagaagaacatgccgcaagacttgccggaaaactgattggccggacaggccgcgtcgtgcacgcagcaccttgcgtcggtgttggagatctgcaccacatttcggccccaccggttcttcacgatcttggccttgctagactgctccttcagcgcgcgctgcccgttttcgctcgtcacatccatttcaatcacgtgctccttatttatcataatgcttccgtgtagacacttaagctcgccttcgatctcagcgcagcggtgcagccacaacgcgcagcccgtgggctcgtgatgcttgtaggtcacctctgcaaacgactgcaggtacgcctgcaggaatcgccccatcatcgtcacaaaggtcttgttgctggtgaaggtcagctgcaacccgcggtgctcctcgttcagccaggtcttgcatacggccgccagagcttccacttggtcaggcagtagtttgaagttcgcctttagatcgttatccacgtggtacttgtccatcagcgcgcgcgcagcctccatgcccttctcccacgcagacacgatcggcacactcagcgggttcatcaccgtaatttcactttccgcttcgctgggctcttcctcttcctcttgcgtccgcataccacgcgccactgggtcgtcttcattcagccgccgcactgtgcgcttacctcctttgccatgcttgattagcaccggtgggttgctgaaacccaccatttgtagcgccacatcttctctttcttcctcgctgtccacgattacctctggtgatggcgggcgctcgggcttgggagaagggcgcttctttttcttcttgggcgcaatggccaaatccgccgccgaggtcgatggccgcgggctgggtgtgcgcggcaccagcgcgtcttgtgatgagtcttcctcgtcctcggactcgatacgccgcctcatccgcttttttgggggcgcccggggaggcggcggcgacggggacggggacgacacgtcctccatggttgggggacgtcgcgccgcaccgcgtccgcgctcgggggtggtttcgcgctgctcctcttcccgactggccatttccttctcctataggcagaaaaagatcatggagtcagtcgagaagaaggacagcctaaccgccccctctgagttcgccaccaccgcctccaccgatgccgccaacgcgcctaccaccttccccgtcgaggcacccccgcttgaggaggaggaagtgattatcgagcaggacccaggttttgtaagcgaagacgacgaggaccgctcagtaccaacagaggataaaaagcaagaccaggacaacgcagaggcaaacgaggaacaagtcgggcggggggacgaaaggcatggcgactacctagatgtgggagacgacgtgctgttgaagcatctgcagcgccagtgcgccattatctgcgacgcgttgcaagagcgcagcgatgtgcccctcgccatagcggatgtcagccttgcctacgaacgccacctattctcaccgcgcgtaccccccaaacgccaagaaaacggcacatgcgagcccaacccgcgcctcaacttctaccccgtatttgccgtgccagaggtgcttgccacctatcacatctttttccaaaactgcaagatacccctatcctgccgtgccaaccgcagccgagcggacaagcagctggccttgcggcagggcgctgtcatacctgatatcgcctcgctcaacgaagtgccaaaaatctttgagggtcttggacgcgacgagaagcgcgcggcaaacgctctgcaacaggaaaacagcgaaaatgaaagtcactctggagtgttggtggaactcgagggtgacaacgcgcgcctagccgtactaaaacgcagcatcgaggtcacccactttgcctacccggcacttaacctaccccccaaggtcatgagcacagtcatgagtgagctgatcgtgcgccgtgcgcagcccctggagagggatgcaaatttgcaagaacaaacagaggagggcctacccgcagttggcgacgagcagctagcgcgctggcttcaaacgcgcgagcctgccgacttggaggagcgacgcaaactaatgatggccgcagtgctcgttaccgtggagcttgagtgcatgcagcggttctttgctgacccggagatgcagcgcaagctagaggaaacattgcactacacctttcgacagggctacgtacgccaggcctgcaagatctccaacgtggagctctgcaacctggtctcctaccttggaattttgcacgaaaaccgccttgggcaaaacgtgcttcattccacgctcaagggcgaggcgcgccgcgactacgtccgcgactgcgtttacttatttctatgctacacctggcagacggccatgggcgtttggcagcagtgcttggaggagtgcaacctcaaggagctgcagaaactgctaaagcaaaacttgaaggacctatggacggccttcaacgagcgctccgtggccgcgcacctggcggacatcattttccccgaacgcctgcttaaaaccctgcaacagggtctgccagacttcaccagtcaaagcatgttgcagaactttaggaactttatcctagagcgctcaggaatcttgcccgccacctgctgtgcacttcctagcgactttgtgcccattaagtaccgcgaatgccctccgccgctttggggccactgctaccttctgcagctagccaactaccttgcctaccactctgacataatggaagacgtgagcggtgacggtctactggagtgtcactgtcgctgcaacctatgcaccccgcaccgctccctggtttgcaattcgcagctgcttaacgaaagtcaaattatcggtacctttgagctgcagggtccctcgcctgacgaaaagtccgcggctccggggttgaaactcactccggggctgtggacgtcggcttaccttcgcaaatttgtacctgaggactaccacgcccacgagattaggttctacgaagaccaatcccgcccgcctaatgcggagcttaccgcctgcgtcattacccagggccacattcttggccaattgcaagccatcaacaaagcccgccaagagtttctgctacgaaagggacggggggtttacttggacccccagtccggcgaggagctcaacccaatccccccgccgccgcagccctatcagcagcagccgcgggcccttgcttcccaggatggcacccaaaaagaagctgcagctgccgccgccacccacggacgaggaggaatactgggacagtcaggcagaggaggttttggacgaggaggaggaggacatgatggaagactgggagagcctagacgaggaagcttccgaggtcgaagaggtgtcagacgaaacaccgtcaccctcggtcgcattcccctcgccggcgccccagaaatcggcaaccggttccagcatggctacaacctccgctcctcaggcgccgccggcactgcccgttcgccgacccaaccgtagatgggacaccactggaaccagggccggtaagtccaagcagccgccgccgttagcccaagagcaacaacagcgccaaggctaccgctcatggcgcgggcacaagaacgccatagttgcttgcttgcaagactgtgggggcaacatctccttcgcccgccgctttcttctctaccatcacggcgtggccttcccccgtaacatcctgcattactaccgtcatctctacagcccatactgcaccggcggcagcggcagcaacagcagcggccacacagaagcaaaggcgaccggatagcaagactctgacaaagcccaagaaatccacagcggcggcagcagcaggaggaggagcgctgcgtctggcgcccaacgaacccgtatcgacccgcgagcttagaaacaggatttttcccactctgtatgctatatttcaacagagcaggggccaagaacaagagctgaaaataaaaaacaggtctctgcgatccctcacccgcagctgcctgtatcacaaaagcgaagatcagcttcggcgcacgctggaagacgcggaggctctcttcagtaaatactgcgcgctgactcttaaggactagtttcgcgccctttctcaaatttaagcgcgaaaactacgtcatctccagcggccacacccggcgccagcacctgttgtcagcgccattatgagcaaggaaattcccacgccctacatgtggagttaccagccacaaatgggacttgcggctggagctgcccaagactactcaacccgaataaactacatgagcgcgggaccccacatgatatcccgggtcaacggaatacgcgcccaccgaaaccgaattctcctggaacaggcggctattaccaccacacctcgtaataaccttaatccccgtagttggcccgctgccctggtgtaccaggaaagtcccgctcccaccactgtggtacttcccagagacgcccaggccgaagttcagatgactaactcaggggcgcagcttgcgggcggctttcgtcacagggtgcggtcgcccgggcagggtataactcacctgacaatcagagggcgaggtattcagctcaacgacgagtcggtgagctcctcgcttggtctccgtccggacgggacatttcagatcggcggcgccggccgctcttcattcacgcctcgtcaggcaatcctaactctgcagacctcgtcctctgagccgcgctctggaggcattggaactctgcaatttattgaggagtttgtgccatcggtctactttaaccccttctcgggacctcccggccactatccggatcaatttattcctaactttgacgcggtaaaggactcggcggacggctacgactgaatgttaagtggagaggcagagcaactgcgcctgaaacacctggtccactgtcgccgccacaagtgctttgcccgcgactccggtgagttttgctactttgaattgcccgaggatcatatcgagggcccggcgcacggcgtccggcttaccgcccagggagagcttgcccgtagcctgattcgggagtttacccagcgccccctgctagttgagcgggacaggggaccctgtgttctcactgtgatttgcaactgtcctaaccctggattacatcaagatcctctagttaatgtcaggtcgcctaagtcgattaactagagtacccggggatcttattccctttaactaataaaaaaaaataataaagcatcacttacttaaaatcagttagcaaatttctgtccagtttattcagcagcacctccttgccctcctcccagctctggtattgcagcttcctcctggctgcaaactttctccacaatctaaatggaatgtcagtttcctcctgttcctgtccatccgcacccactatcttcatgttgttgcagatgaagcgcgcaagaccgtctgaagataccttcaaccccgtgtatccatatgacacggaaaccggtcctccaactgtgccttttcttactcctccctttgtatcccccaatgggtttcaagagagtccccctggggtactctctttgcgcctatccgaacctctagttacctccaatggcatgcttgcgctcaaaatgggcaacggcctctctctggacgaggccggcaaccttacctcccaaaatgtaaccactgtgagcccacctctcaaaaaaaccaagtcaaacataaacctggaaatatctgcacccctcacagttacctcagaagccctaactgtggctgccgccgcacctctaatggtcgcgggcaacacactcaccatgcaatcacaggccccgctaaccgtgcacgactccaaacttagcattgccacccaaggacccctcacagtgtcagaaggaaagctagccctgcaaacatcaggccccctcaccaccaccgatagcagtacccttactatcactgcctcaccccctctaactactgccactggtagcttgggcattgacttgaaagagcccatttatacacaaaatggaaaactaggactaaagtacggggctcctttgcatgtaacagacgacctaaacactttgaccgtagcaactggtccaggtgtgactattaataatacttccttgcaaactaaagttactggagccttgggttttgattcacaaggcaatatgcaacttaatgtagcaggaggactaaggattgattctcaaaacagacgccttatacttgatgttagttatccgtttgatgctcaaaaccaactaaatctaagactaggacagggccctctttttataaactcagcccacaacttggatattaactacaacaaaggcctttacttgtttacagcttcaaacaattccaaaaagcttgaggttaacctaagcactgccaaggggttgatgtttgacgctacagccatagccattaatgcaggagatgggcttgaatttggttcacctaatgcaccaaacacaaatcccctcaaaacaaaaattggccatggcctagaatttgattcaaacaaggctatggttcctaaactaggaactggccttagttttgacagcacaggtgccattacagtaggaaacaaaaataatgataagctaactttgtggaccggaataaaccctccacctaactgtcaaattgtggaaaacactaatacaaatgatggcaaacttactttagtattagtaaaaaatggagggcttgttaatggctacgtgtctctagttggtgtatcagacactgtgaaccaaatgttcacacaaaagacagcaaacatccaattaagattatattttgactcttctggaaatctattaactgaggaatcagacttaaaaattccacttaaaaataaatcttctacagcgaccagtgaaactgtagccagcagcaaagcctttatgccaagtactacagcttatcccttcaacaccactactagggatagtgaaaactacattcatggaatatgttactacatgactagttatgatagaagtctatttcccttgaacatttctataatgctaaacagccgtatgatttcttccaatgttgcctatgccatacaatttgaatggaatctaaatgcaagtgaatctccagaaagcaacatagctacgctgaccacatccccctttttcttttcttacattacagaagacgacaactaaagaatcgtttgtgttatgtttcaacgtgtttatttttcaattgcagaaaatttcaagtcatttttcattcagtagtatagccccaccaccacatagcttatacagatcaccgtaccttaatcaaactcacagaaccctagtattcaacctgccacctccctcccaacacacagagtacacagtcctttctccccggctggccttaaaaagcatcatatcatgggtaacagacatattcttaggtgttatattccacacggtttcctgtcgagccaaacgctcatcagtgatattaataaactccccgggcagctcacttaagttcatgtcgctgtccagctgctgagccacaggctgctgtccaacttgcggttgcttaacgggcggcgaaggagaagtccacgctcagcgaataaactgctgccgccgccgctccgtcctgcaggaatacaacatggcagtggtctcctcagcgatgattcgcaccgcccgcagcataaggcgccttgtcctccgggcacagcagcgcaccctgatctcacttaaatcagcacagtaactgcagcacagcaccacaatattgttcaaaatcccacagtgcaaggcgctgtatccaaagctcatggcggggaccacagaacccacgtggccatcataccacaagcgcaggtagattaagtggcgacccctcataaacacgctggacataaacattacctcttttggcatgttgtaattcaccacctcccggtaccatataaacctctgattaaacatggcgccatccaccaccatcctaaaccagctggccaaaacctgcccgccggctatacactgcagggaaccgggactggaacaatgacagtggagagcccaggactcgtaaccatggatcatcatgctcgtcatgatatcaatgttggcacaacacaggcacacgtgcatacacttcctcaggattacaagctcctcccgcgttagaaccatatcccagggaacaacccattcctgaatcagcgtaaatcccacactgcagggaagacctcgcacgtaactcacgttgtgcattgtcaaagtgttacattcgggcagcagcggatgatcctccagtatggtagcgcgggtttctgtctcaaaaggaggtagacgatccctactgtacggagtgcgccgagacaaccgagatcgtgttggtcgtagtgtcatgccaaatggaacgccggacgtagtcatatttcctgaagcaaaaccaggtgcgggcgtgacaaacagatctgcgtctccggtctcgccgcttagatcgctctgtgtagtagttgtagtatatccactctctcaaagcatccaggcgccccctggcttcgggttctatgtaaactccttcatgcgccgctgccctgataacatccaccaccgcagaataagccacacccagccaacctacacattcgttctgcgagtcacacacgggaggagcgggaagagctggaagaaccatgtttttttttttattccaaaagattatccaaaacctcaaaatgaagatctattaagtgaacgcgctcccctccggtggcgtggtcaaactctacagccaaagaacagataatggcatttgtaagatgttgcacaatggcttccaaaaggcaaacggccctcacgtccaagtggacgtaaaggctaaacccttcagggtgaatctcctctataaacattccagcaccttcaaccatgcccaaataattctcatctcgccaccttctcaatatatctctaagcaaatcccgaatattaagtccggccattgtaaaaatctgctccagagcgccctccaccttcagcctcaagcagcgaatcatgattgcaaaaattcaggttcctcacagacctgtataagattcaaaagcggaacattaacaaaaataccgcgatcccgtaggtcccttcgcagggccagctgaacataatcgtgcaggtctgcacggaccagcgcggccacttccccgccaggaaccatgacaaaagaacccacactgattatgacacgcatactcggagctatgctaaccagcgtagccccgatgtaagcttgttgcatgggcggcgatataaaatgcaaggtgctgctcaaaaaatcaggcaaagcctcgcgcaaaaaagaaagcacatcgtagtcatgctcatgcagataaaggcaggtaagctccggaaccaccacagaaaaagacaccatttttctctcaaacatgtctgcgggtttctgcataaacacaaaataaaataacaaaaaaacatttaaacattagaagcctgtcttacaacaggaaaaacaacccttataagcataagacggactacggccatgccggcgtgaccgtaaaaaaactggtcaccgtgattaaaaagcaccaccgacagctcctcggtcatgtccggagtcataatgtaagactcggtaaacacatcaggttgattcacatcggtcagtgctaaaaagcgaccgaaatagcccgggggaatacatacccgcaggcgtagagacaacattacagcccccataggaggtataacaaaattaataggagagaaaaacacataaacacctgaaaaaccctcctgcctaggcaaaatagcaccctcccgctccagaacaacatacagcgcttccacagcggcagccataacagtcagccttaccagtaaaaaagaaaacctattaaaaaaacaccactcgacacggcaccagctcaatcagtcacagtgtaaaaaagggccaagtgcagagcgagtatatataggactaaaaaatgacgtaacggttaaagtccacaaaaaacacccagaaaaccgcacgcgaacctacgcccagaaacgaaagccaaaaaacccacaacttcctcaaatcgtcacttccgttttcccacgttacgtcacttcccattttaagaaaactacaattcccaacacatacaagttactccgccctaaaacctacgtcacccgccccgttcccacgccccgcgccacgtcacaaactccaccccctcattatcatattggcttcaatccaaaataaggtatattattgatgatg

SEQ ID NO: 45 - DNA, 35846 bp, Artificial Sequence
  Adk35RF-Spike/E4orf6(RSV)-E4dl-318(E4re#43)
ttaattaacatcatcaataatataccttattttggattgaagccaatatgataatgagggggtggagtttgtgacgtggcgcggggcgtgggaacggggcgggtgacgtagtagtgtggcggaagtgtgatgttgcaagtgtggcggaacacatgtaagcgacggatgtggcaaaagtgacgtttttggtgtgcgccggtgtacacaggaagtgacaattttcgcgcggttttaggcggatgttgtagtaaatttgggcgtaaccgagtaagatttggccattttcgcgggaaaactgaataagaggaagtgaaatctgaataattttgtgttactcatagcgcgtaataatttgatccgcgttaagatacattgatgagtttggacaaaccacaactagaatgcagtgaaaaaaatgctttatttgtgaaatttgtgatgctattgctttatttgtaaccattataagctgcaataaacaagttaacaacaacaattgcattcattttatgtttcaggttcagggggaggtgtgggaggttttttaaagcaagtaaaacctctacaaatgtggtatggctgattatgatcaattttcatggccacttgatgtattgttcatatttgcccagttcttggaggtcaatcagggactcattcaggttcttagccacctcattcagtctgtcaatctccttctggatgttcaccacagaggcattgatgccagagatgtctcccaggtccacatcagggctggtgtggttcttgaagtatttgtccagttcctccttgaaggagtccagttcaggttggagtgggtcatagactgtgttgttcacaatgccaatcaccacatcacagttgccagacacaaaggtgttgtctgtggtgataatctgtggttcatagaagttcctctgggtcacaaaccagtgggtgccattgctcacaaacactccctcccttggaaagtgagccttgccatcatggcagatggcaggggctgtggtgaagttcttctcctgggcaggcacataggtcacatgcaggaacaccactccatgaggggcagactgtggaaaactcatcaggtggtagcccttgccacagaagtccaccctcttgctttgtcccagcacacactcactcatcttggtggcagccaggttggcagatgccctaatctcagcagccctgataagttgttgggtcacataggtttggagggattggagtctgcctgtaatcagtctgtcaatctggacctcagcctccaccttgtccagtctgctcaggatgtcattcagcacagaggagatggctccaaagttgctggaaagttgcttcaccagggtgttcagagcctgggcattctggttcaccacatcttggagtttgcccagggcagaggctgtgctggacagggagtcctgaatcttgccaatggcagagttgaactggttggcaatcagtttctggttctcatagagcacattctgggtcactccaatgccattgaacctgtaagccatctgcatagcaaatgggatttggagggctgctcctgctccaaaggtccagccagaggtgatggtgccagccagcagggcagaggtgtattgggcaatcatctcatctgtcagcagtggaggcagcactgtcagtccattgaacttctgggcacaaatcaggtccctggcagcaatgtctcccagacagtctccatattgcttgatgaagccagcatcagccagggtcaccttgttgaacagcaggtcctcaatgaaggacctcttgcttggcttgcttgggtcaggcagaatctggctgaagttgaagcctccaaagtccttgattggaggtgtcttgtaaatctgcttcacctgggcaaacacctcctgggtgttcttgtcctgttccacagcaatgcctgtcagagccctgttaagttgggtacagaaggagccatattggagcagcaggttgctacactctgtgctgtctccacagatatacattgtacagtccacagaggtcttggtcatactcacaggcagaatctctgtggtcacagagatggtgaagttggttgggatggcaatgctgttgttgctgtaagccacagagttctctgctcccagactcattgtgtaggcaatgatgctctggcttgccacagacctcgacccaccgccaccggtctgggtctggtaggaggcacagatgcctgctccaattgggatgtcacactcataggagttgttcacatgctctgctccaatcagacagccagccctggtctggaacacattgctgcctgtgctgtagaccctccaggttggtgtaagttggtcagcatggatagccacaggcacctcagtacagttcacatcctggtagagcacagccacctggttgctggtgttggtgccaggtgtaatcacagacactcctccaaaggaacatggtgtgatgtccagaatctccaaggtctgtgggtccctcacagcatctgtggtgtcagcaatgtccctgccaaactgttggaatggcaggaacttcttgttgctctctgtcagcactcctgtgcctgtcagtccattgaagttgaagttcacacacttgttcttcaccaggttggtgctcttctttggtccacacactgtggcaggggcatggagcagttcaaaggacagcaccaccaccctgtatggttggtagcccactccattggttggttggaagccataggattggagtggaaagtaacagttgaagccctccactccattacatggtgtgctgccagcctggtaaatctctgtgctgatgtccctctcaaatggtttcaggttgctcttcctgaacagtctgtagaggtagttgtagttgcctcccaccttgctgtccaggttgttgctgttccaggcaatcacacagcctgtgaagtcatcaggcagtttgtagttgtagtcagcaatcttgcctgtttgtccaggggcaatctgtctcacctcatctcccctaatcacaaaggagtcagcatagacattggtgaaacacaggtcattcagtttggttgggctcactccataacacttgaaggtgctgaaggaggcagagttgtagagcacagagtagtcagccacacagttgctaatcctcttcctgttccaggcatagacagaggcaaacctggtggcattgaacacctctccaaatggacacaggttggtgatgtttggaaacctcacaatgctctctgttggttggaccctgaagttgctggtctggtagatgcccttctccactgtgaaggatttcagggtacacttggtctcagacagtgggtccagggcacagtccacagcatctgtgatggtgccattctcattgtatttcagcaggaaggtccttggttggaggtagcccacatagtaggctgctgctcctgctgtccagccagaggaggagtctccaggtgtcaggtaggacctgtgcagagccagcagggtctggaacctggtgatgttgatgccaattggcaggtccaccagtggttccaaggcagagaagccctgtggcaggtccctcaccaggttgattggtgtgtgtttgctgtaaatcttgaagtagccatcaatgttcttgaacacaaactccctcaggttcttgaagttgccctgcttgccctccaagtccatcaggaatggttggctcacatattcaaaggtacagttgttggcagaggagtagaccctgaactcagactccatccaggacttgttgttcttgtggtagtagactcccaggaatgggtcattacagaactggaactcacacaccttaatcaccacattggtggcattgttcacaatcagcagggactgggtcttgctgtccagggtggtgccaaaaatccagcccctgatgatgttgctcttctctgtgctggcaaagtagactccatcattgaatggcagcacagggttgtcaaacctcttggtgccattggtgccagacacatggatggcatggaaccaggtcacattgctgaagaatggcaggaacaggtcctgggtgctgtgcagcacagaggacctgaacaccttgtcagggtagtagactcccctggtgaaggagttggtgtaggcaggaggaagttgggtcctggtggtcaggttcacacactggctggacaccagtggcagcagcaccaggaacacaaacatggtggcaaatcggaggctggatcggtcccggtgtcttctatggaggtcaaaacagcgtggatggcgtctccaggcgatctgacggttcactaaacgagctcgtcgacgatctctatcactgatagggagatctctatcactgatagggagagctctgcttatatagacctcccaccgtacacgcctaccgcccatttgcgtcaatggggcggagttgttacgacattttggaaagtcccgttgattttggtgccaaaacaaactcccattgacgtcaatggggtggagacttggaaatccccgtgagtcaaaccgctatccacgcccattgatgtactgccaaaaccgcatcaccatggtaatagcgatgactaatacgtagatgtactgccaagtaggaaagtcccataaggtcatgtactgggcataatgccaggcgggccatttaccgtcattgacgtcaatagggggcgtacttggcatatgatacacttgatgtactgccaagtgggcagtttaccgtaaatactccacccattgacgtcaatggaaagtccctattggcgttactatgggaacatacgtcattattgacgtcaatgggcgggggtcgttgggcggtcagccaggcgggccatttaccgtaagttatgtaacgcggaactccatatatgggctatgaactaatgaccccgtaattgattactattacagtgtagtcttatgcaatactcttgtagtcttgcaacatggtaacgatgagttagcaacatgccttacaaggagagaaaaagcaccgtgcatgccgattggtggaagtaaggtggtacgatcgtgccttattaggaaggcaacagacgggtctgacatggattggacgaaccactgaattgccgcattgcagagatattgtatttaagtgcctagctcgatacataaacaaactaccccaagctggccaccatgactacgtccggcgttccatttggcatgacactacgaccaacacgatctcggttgtctcggcgcactccgtacagtagggatcgtctacctccttttgagacagaaacccgcgctaccatactggaggatcatccgctgctgcccgaatgtaacactttgacaatgcacaacgtgagttacgtgcgaggtcttccctgcagtgtgggatttacgctgattcaggaatgggttgttccctgggatatggttctaacgcgggaggagcttgtaatcctgaggaagtgtatgcacgtgtgcctgtgttgtgccaacattgatatcatgacgagcatgatgatccatggttacgagtcctgggctctccactgtcattgttccagtcccggttccctgcagtgtatagccggcgggcaggttttggccagctggtttaggatggtggtggatggcgccatgtttaatcagaggtttatatggtaccgggaggtggtgaattacaacatgccaaaagaggtaatgtttatgtccagcgtgtttatgaggggtcgccacttaatctacctgcgcttgtggtatgatggccacgtgggttctgtggtccccgccatgagctttggatacagcgccttgcactgtgggattttgaacaatattgtggtgctgtgctgcagttactgtgctgatttaagtgagatcagggtgcgctgctgtgcccggaggacaaggcgccttatgctgcgggcggtgcgaatcatcgctgaggagaccactgccatgttgtattcctgcaggacggagcggcggcggcagcagtttattcgcgcgctgctgcagcaccaccgccctatcctgatgcacgattatgactctacccccatgtagaagcttggggatcaattctctagagctcgctgatcagcctcgactgtgccttctagttgccagccatctgttgtttgcccctcccccgtgccttccttgaccctggaaggtgccactcccactgtcctttcctaataaaatgaggaaattgcatcgcattgtctgagtaggtgtcattctattctggggggtggggtggggcaggacagcaagggggaggattgggaagacaatagcaggcatgctggggatgcggtgggctctatggcttctgaggaaattgggcgtggcttaagggtgggaaagaatatataaggtgggggtcttatgtagttttgtatctgttttgcagcagccgccgccgccatgagcaccaactcgtttgatggaagcattgtgagctcatatttgacaacgcgcatgcccccatgggccggggtgcgtcagaatgtgatgggctccagcattgatggtcgccccgtcctgcccgcaaactctactaccttgacctacgagaccgtgtctggaacgccgttggagactgcagcctccgccgccgcttcagccgctgcagccaccgcccgcgggattgtgactgactttgctttcctgagcccgcttgcaagcagtgcagcttcccgttcatccgcccgcgatgacaagttgacggctcttttggcacaattggattctttgacccgggaacttaatgtcgtttctcagcagctgttggatctgcgccagcaggtttctgccctgaaggcttcctcccctcccaatgcggtttaaaacataaataaaaaaccagactctgtttggatttggatcaagcaagtgtcttgctgtctttatttaggggttttgcgcgcgcggtaggcccgggaccagcggtctcggtcgttgagggtcctgtgtattttttccaggacgtggtaaaggtgactctggatgttcagatacatgggcataagcccgtctctggggtggaggtagcaccactgcagagcttcatgctgcggggtggtgttgtagatgatccagtcgtagcaggagcgctgggcgtggtgcctaaaaatgtctttcagtagcaagctgattgccaggggcaggcccttggtgtaagtgtttacaaagcggttaagctgggatgggtgcatacgtggggatatgagatgcatcttggactgtatttttaggttggctatgttcccagccatatccctccggggattcatgttgtgcagaaccaccagcacagtgtatccggtgcacttgggaaatttgtcatgtagcttagaaggaaatgcgtggaagaacttggagacgcccttgtgacctccaagattttccatgcattcgtccataatgatggcaatgggcccacgggcggcggcctgggcgaagatatttctgggatcactaacgtcatagttgtgttccaggatgagatcgtcataggccatttttacaaagcgcgggcggagggtgccagactgcggtataatggttccatccggcccaggggcgtagttaccctcacagatttgcatttcccacgctttgagttcagatggggggatcatgtctacctgcggggcgatgaagaaaacggtttccggggtaggggagatcagctgggaagaaagcaggttcctgagcagctgcgacttaccgcagccggtgggcccgtaaatcacacctattaccggctgcaactggtagttaagagagctgcagctgccgtcatccctgagcaggggggccacttcgttaagcatgtccctgactcgcatgttttccctgaccaaatccgccagaaggcgctcgccgcccagcgatagcagttcttgcaaggaagcaaagtttttcaacggtttgagaccgtccgccgtaggcatgcttttgagcgtttgaccaagcagttccaggcggtcccacagctcggtcacctgctctacggcatctcgatccagcatatctcctcgtttcgcgggttggggcggctttcgctgtacggcagtagtcggtgctcgtccagacgggccagggtcatgtctttccacgggcgcagggtcctcgtcagcgtagtctgggtcacggtgaaggggtgcgctccgggctgcgcgctggccagggtgcgcttgaggctggtcctgctggtgctgaagcgctgccggtcttcgccctgcgcgtcggccaggtagcatttgaccatggtgtcatagtccagcccctccgcggcgtggcccttggcgcgcagcttgcccttggaggaggcgccgcacgaggggcagtgcagacttttgagggcgtagagcttgggcgcgagaaataccgattccggggagtaggcatccgcgccgcaggccccgcagacggtctcgcattccacgagccaggtgagctctggccgttcggggtcaaaaaccaggtttcccccatgctttttgatgcgtttcttacctctggtttccatgagccggtgtccacgctcggtgacgaaaaggctgtccgtgtccccgtatacagacttgagaggcctgtcctcgagcggtgttccgcggtcctcctcgtatagaaactcggaccactctgagacaaaggctcgcgtccaggccagcacgaaggaggctaagtgggaggggtagcggtcgttgtccactagggggtccactcgctccagggtgtgaagacacatgtcgccctcttcggcatcaaggaaggtgattggtttgtaggtgtaggccacgtgaccgggtgttcctgaaggggggctataaaagggggtgggggcgcgttcgtcctcactctcttccgcatcgctgtctgcgagggccagctgttggggtgagtactccctctgaaaagcgggcatgacttctgcgctaagattgtcagtttccaaaaacgaggaggatttgatattcacctggcccgcggtgatgcctttgagggtggccgcatccatctggtcagaaaagacaatctttttgttgtcaagcttggtggcaaacgacccgtagagggcgttggacagcaacttggcgatggagcgcagggtttggtttttgtcgcgatcggcgcgctccttggccgcgatgtttagctgcacgtattcgcgcgcaacgcaccgccattcgggaaagacggtggtgcgctcgtcgggcaccaggtgcacgcgccaaccgcggttgtgcagggtgacaaggtcaacgctggtggctacctctccgcgtaggcgctcgttggtccagcagaggcggccgcccttgcgcgagcagaatggcggtagggggtctagctgcgtctcgtccggggggtctgcgtccacggtaaagaccccgggcagcaggcgcgcgtcgaagtagtctatcttgcatccttgcaagtctagcgcctgctgccatgcgcgggcggcaagcgcgcgctcgtatgggttgagtgggggaccccatggcatggggtgggtgagcgcggaggcgtacatgccgcaaatgtcgtaaacgtagaggggctctctgagtattccaagatatgtagggtagcatcttccaccgcggatgctggcgcgcacgtaatcgtatagttcgtgcgagggagcgaggaggtcgggaccgaggttgctacgggcgggctgctctgctcggaagactatctgcctgaagatggcatgtgagttggatgatatggttggacgctggaagacgttgaagctggcgtctgtgagacctaccgcgtcacgcacgaaggaggcgtaggagtcgcgcagcttgttgaccagctcggcggtgacctgcacgtctagggcgcagtagtccagggtttccttgatgatgtcatacttatcctgtcccttttttttccacagctcgcggttgaggacaaactcttcgcggtctttccagtactcttggatcggaaacccgtcggcctccgaacggtaagagcctagcatgtagaactggttgacggcctggtaggcgcagcatcccttttctacgggtagcgcgtatgcctgcgcggccttccggagcgaggtgtgggtgagcgcaaaggtgtccctgaccatgactttgaggtactggtatttgaagtcagtgtcgtcgcatccgccctgctcccagagcaaaaagtccgtgcgctttttggaacgcggatttggcagggcgaaggtgacatcgttgaagagtatctttcccgcgcgaggcataaagttgcgtgtgatgcggaagggtcccggcacctcggaacggttgttaattacctgggcggcgagcacgatctcgtcaaagccgttgatgttgtggcccacaatgtaaagttccaagaagcgcgggatgcccttgatggaaggcaattttttaagttcctcgtaggtgagctcttcaggggagctgagcccgtgctctgaaagggcccagtctgcaagatgagggttggaagcgacgaatgagctccacaggtcacgggccattagcatttgcaggtggtcgcgaaaggtcctaaactggcgacctatggccattttttctggggtgatgcagtagaaggtaagcgggtcttgttcccagcggtcccatccaaggttcgcggctaggtctcgcgcggcagtcactagaggctcatctccgccgaacttcatgaccagcatgaagggcacgagctgcttcccaaaggcccccatccaagtataggtctctacatcgtaggtgacaaagagacgctcggtgcgaggatgcgagccgatcgggaagaactggatctcccgccaccaattggaggagtggctattgatgtggtgaaagtagaagtccctgcgacgggccgaacactcgtgctggcttttgtaaaaacgtgcgcagtactggcagcggtgcacgggctgtacatcctgcacgaggttgacctgacgaccgcgcacaaggaagcagagtgggaatttgagcccctcgcctggcgggtttggctggtggtcttctacttcggctgcttgtccttgaccgtctggctgctcgaggggagttacggtggatcggaccaccacgccgcgcgagcccaaagtccagatgtccgcgcgcggcggtcggagcttgatgacaacatcgcgcagatgggagctgtccatggtctggagctcccgcggcgtcaggtcaggcgggagctcctgcaggtttacctcgcatagacgggtcagggcgcgggctagatccaggtgatacctaatttccaggggctggttggtggcggcgtcgatggcttgcaagaggccgcatccccgcggcgcgactacggtaccgcgcggcgggcggtgggccgcgggggtgtccttggatgatgcatctaaaagcggtgacgcgggcgagcccccggaggtagggggggctccggacccgccgggagagggggcaggggcacgtcggcgccgcgcgcgggcaggagctggtgctgcgcgcgtaggttgctggcgaacgcgacgacgcggcggttgatctcctgaatctggcgcctctgcgtgaagacgacgggcccggtgagcttgaacctgaaagagagttcgacagaatcaatttcggtgtcgttgacggcggcctggcgcaaaatctcctgcacgtctcctgagttgtcttgataggcgatctcggccatgaactgctcgatctcttcctcctggagatctccgcgtccggctcgctccacggtggcggcgaggtcgttggaaatgcgggccatgagctgcgagaaggcgttgaggcctccctcgttccagacgcggctgtagaccacgcccccttcggcatcgcgggcgcgcatgaccacctgcgcgagattgagctccacgtgccgggcgaagacggcgtagtttcgcaggcgctgaaagaggtagttgagggtggtggcggtgtgttctgccacgaagaagtacataacccagcgtcgcaacgtggattcgttgatatcccccaaggcctcaaggcgctccatggcctcgtagaagtccacggcgaagttgaaaaactgggagttgcgcgccgacacggttaactcctcctccagaagacggatgagctcggcgacagtgtcgcgcacctcgcgctcaaaggctacaggggcctcttcttcttcttcaatctcctcttccataagggcctccccttcttcttcttctggcggcggtgggggaggggggacacggcggcgacgacggcgcaccgggaggcggtcgacaaagcgctcgatcatctccccgcggcgacggcgcatggtctcggtgacggcgcggccgttctcgcgggggcgcagttggaagacgccgcccgtcatgtcccggttatgggttggcggggggctgccatgcggcagggatacggcgctaacgatgcatctcaacaattgttgtgtaggtactccgccgccgagggacctgagcgagtccgcatcgaccggatcggaaaacctctcgagaaaggcgtctaaccagtcacagtcgcaaggtaggctgagcaccgtggcgggcggcagcgggcggcggtcggggttgtttctggcggaggtgctgctgatgatgtaattaaagtaggcggtcttgagacggcggatggtcgacagaagcaccatgtccttgggtccggcctgctgaatgcgcaggcggtcggccatgccccaggcttcgttttgacatcggcgcaggtctttgtagtagtcttgcatgagcctttctaccggcacttcttcttctccttcctcttgtcctgcatctcttgcatctatcgctgcggcggcggcggagtttggccgtaggtggcgccctcttcctcccatgcgtgtgaccccgaagcccctcatcggctgaagcagggctaggtcggcgacaacgcgctcggctaatatggcctgctgcacctgcgtgagggtagactggaagtcatccatgtccacaaagcggtggtatgcgcccgtgttgatggtgtaagtgcagttggccataacggaccagttaacggtctggtgacccggctgcgagagctcggtgtacctgagacgcgagtaagccctcgagtcaaatacgtagtcgttgcaagtccgcaccaggtactggtatcccaccaaaaagtgcggcggcggctggcggtagaggggccagcgtagggtggccggggctccgggggcgagatcttccaacataaggcgatgatatccgtagatgtacctggacatccaggtgatgccggcggcggtggtggaggcgcgcggaaagtcgcggacgcggttccagatgttgcgcagcggcaaaaagtgctccatggtcgggacgctctggccggtcaggcgcgcgcaatcgttgacgctctagcgtgcaaaaggagagcctgtaagcgggcactcttccgtggtctggtggataaattcgcaagggtatcatggcggacgaccggggttcgagccccgtatccggccgtccgccgtgatccatgcggttaccgcccgcgtgtcgaacccaggtgtgcgacgtcagacaacgggggagtgctccttttggcttccttccaggcgcggcggctgctgcgctagcttttttggccactggccgcgcgcagcgtaagcggttaggctggaaagcgaaagcattaagtggctcgctccctgtagccggagggttattttccaagggttgagtcgcgggacccccggttcgagtctcggaccggccggactgcggcgaacgggggtttgcctccccgtcatgcaagaccccgcttgcaaattcctccggaaacagggacgagccccttttttgcttttcccagatgcatccggtgctgcggcagatgcgcccccctcctcagcagcggcaagagcaagagcagcggcagacatgcagggcaccctcccctcctcctaccgcgtcaggaggggcgacatccgcggttgacgcggcagcagatggtgattacgaacccccgcggcgccgggcccggcactacctggacttggaggagggcgagggcctggcgcggctaggagcgccctctcctgagcggcacccaagggtgcagctgaagcgtgatacgcgtgaggcgtacgtgccgcggcagaacctgtttcgcgaccgcgagggagaggagcccgaggagatgcgggatcgaaagttccacgcagggcgcgagctgcggcatggcctgaatcgcgagcggttgctgcgcgaggaggactttgagcccgacgcgcgaaccgggattagtcccgcgcgcgcacacgtggcggccgccgacctggtaaccgcatacgagcagacggtgaaccaggagattaactttcaaaaaagctttaacaaccacgtgcgtacgcttgtggcgcgcgaggaggtggctataggactgatgcatctgtgggactttgtaagcgcgctggagcaaaacccaaatagcaagccgctcatggcgcagctgttccttatagtgcagcacagcagggacaacgaggcattcagggatgcgctgctaaacatagtagagcccgagggccgctggctgctcgatttgataaacatcctgcagagcatagtggtgcaggagcgcagcttgagcctggctgacaaggtggccgccatcaactattccatgcttagcctgggcaagttttacgcccgcaagatataccataccccttacgttcccatagacaaggaggtaaagatcgaggggttctacatgcgcatggcgctgaaggtgcttaccttgagcgacgacctgggcgtttatcgcaacgagcgcatccacaaggccgtgagcgtgagccggcggcgcgagctcagcgaccgcgagctgatgcacagcctgcaaagggccctggctggcacgggcagcggcgatagagaggccgagtcctactttgacgcgggcgctgacctgcgctgggccccaagccgacgcgccctggaggcagctggggccggacctgggctggcggtggcacccgcgcgcgctggcaacgtcggcggcgtggaggaatatgacgaggacgatgagtacgagccagaggacggcgagtactaagcggtgatgtttctgatcagatgatgcaagacgcaacggacccggcggtgcgggcggcgctgcagagccagccgtccggccttaactccacggacgactggcgccaggtcatggaccgcatcatgtcgctgactgcgcgcaatcctgacgcgttccggcagcagccgcaggccaaccggctctccgcaattctggaagcggtggtcccggcgcgcgcaaaccccacgcacgagaaggtgctggcgatcgtaaacgcgctggccgaaaacagggccatccggcccgacgaggccggcctggtctacgacgcgctgcttcagcgcgtggctcgttacaacagcggcaacgtgcagaccaacctggaccggctggtgggggatgtgcgcgaggccgtggcgcagcgtgagcgcgcgcagcagcagggcaacctgggctccatggttgcactaaacgccttcctgagtacacagcccgccaacgtgccgcggggacaggaggactacaccaactttgtgagcgcactgcggctaatggtgactgagacaccgcaaagtgaggtgtaccagtctgggccagactattttttccagaccagtagacaaggcctgcagaccgtaaacctgagccaggctttcaaaaacttgcaggggctgtggggggtgcgggctcccacaggcgaccgcgcgaccgtgtctagcttgctgacgcccaactcgcgcctgttgctgctgctaatagcgcccttcacggacagtggcagcgtgtcccgggacacatacctaggtcacttgctgacactgtaccgcgaggccataggtcaggcgcatgtggacgagcatactttccaggagattacaagtgtcagccgcgcgctggggcaggaggacacgggcagcctggaggcaaccctaaactacctgctgaccaaccggcggcagaagatcccctcgttgcacagtttaaacagcgaggaggagcgcattttgcgctacgtgcagcagagcgtgagccttaacctgatgcgcgacggggtaacgcccagcgtggcgctggacatgaccgcgcgcaacatggaaccgggcatgtatgcctcaaaccggccgtttatcaaccgcctaatggactacttgcatcgcgcggccgccgtgaaccccgagtatttcaccaatgccatcttgaacccgcactggctaccgccccctggtttctacaccgggggattcgaggtgcccgagggtaacgatggattcctctgggacgacatagacgacagcgtgttttccccgcaaccgcagaccctgctagagttgcaacagcgcgagcaggcagaggcggcgctgcgaaaggaaagcttccgcaggccaagcagcttgtccgatctaggcgctgcggccccgcggtcagatgctagtagcccatttccaagcttgatagggtctcttaccagcactcgcaccacccgcccgcgcctgctgggcgaggaggagtacctaaacaactcgctgctgcagccgcagcgcgaaaaaaacctgcctccggcatttcccaacaacgggatagagagcctagtggacaagatgagtagatggaagacgtacgcgcaggagcacagggacgtgccaggcccgcgcccgcccacccgtcgtcaaaggcacgaccgtcagcggggtctggtgtgggaggacgatgactcggcagacgacagcagcgtcctggatttgggagggagtggcaacccgtttgcgcaccttcgccccaggctggggagaatgttttaaaaaaaaaaaagcatgatgcaaaataaaaaactcaccaaggccatggcaccgagcgttggttttcttgtattccccttagtatgcggcgcgcggcgatgtatgaggaaggtcctcctccctcctacgagagtgtggtgagcgcggcgccagtggcggcggcgctgggttctcccttcgatgctcccctggacccgccgtttgtgcctccgcggtacctgcggcctaccggggggagaaacagcatccgttactctgagttggcacccctattcgacaccacccgtgtgtacctggtggacaacaagtcaacggatgtggcatccctgaactaccagaacgaccacagcaactttctgaccacggtcattcaaaacaatgactacagcccgggggaggcaagcacacagaccatcaatcttgacgaccggtcgcactggggcggcgacctgaaaaccatcctgcataccaacatgccaaatgtgaacgagttcatgtttaccaataagtttaaggcgcgggtgatggtgtcgcgcttgcctactaaggacaatcaggtggagctgaaatacgagtgggtggagttcacgctgcccgagggcaactactccgagaccatgaccatagaccttatgaacaacgcgatcgtggagcactacttgaaagtgggcagacagaacggggttctggaaagcgacatcggggtaaagtttgacacccgcaacttcagactggggtttgaccccgtcactggtcttgtcatgcctggggtatatacaaacgaagccttccatccagacatcattttgctgccaggatgcggggtggacttcacccacagccgcctgagcaacttgttgggcatccgcaagcggcaacccttccaggagggctttaggatcacctacgatgatctggagggtggtaacattcccgcactgttggatgtggacgcctaccaggcgagcttgaaagatgacaccgaacagggcgggggtggcgcaggcggcagcaacagcagtggcagcggcgcggaagagaactccaacgcggcagccgcggcaatgcagccggtggaggacatgaacgatcatgccattcgcggcgacacctttgccacacgggctgaggagaagcgcgctgaggccgaagcagcggccgaagctgccgcccccgctgcgcaacccgaggtcgagaagcctcagaagaaaccggtgatcaaacccctgacagaggacagcaagaaacgcagttacaacctaataagcaatgacagcaccttcacccagtaccgcagctggtaccttgcatacaactacggcgaccctcagaccggaatccgctcatggaccctgctttgcactcctgacgtaacctgcggctcggagcaggtctactggtcgttgccagacatgatgcaagaccccgtgaccttccgctccacgcgccagatcagcaactttccggtggtgggcgccgagctgttgcccgtgcactccaagagcttctacaacgaccaggccgtctactcccaactcatccgccagtttacctctctgacccacgtgttcaatcgctttcccgagaaccagattttggcgcgcccgccagcccccaccatcaccaccgtcagtgaaaacgttcctgctctcacagatcacgggacgctaccgctgcgcaacagcatcggaggagtccagcgagtgaccattactgacgccagacgccgcacctgcccctacgtttacaaggccctgggcatagtctcgccgcgcgtcctatcgagccgcactttttgagcaagcatgtccatccttatatcgcccagcaataacacaggctggggcctgcgcttcccaagcaagatgtttggcggggccaagaagcgctccgaccaacacccagtgcgcgtgcgcgggcactaccgcgcgccctggggcgcgcacaaacgcggccgcactgggcgcaccaccgtcgatgacgccatcgacgcggtggtggaggaggcgcgcaactacacgcccacgccgccaccagtgtccacagtggacgcggccattcagaccgtggtgcgcggagcccggcgctatgctaaaatgaagagacggcggaggcgcgtagcacgtcgccaccgccgccgacccggcactgccgcccaacgcgcggcggcggccctgcttaaccgcgcacgtcgcaccggccgacgggcggccatgcgggccgctcgaaggctggccgcgggtattgtcactgtgccccccaggtccaggcgacgagcggccgccgcagcagccgcggccattagtgctatgactcagggtcgcaggggcaacgtgtattgggtgcgcgactcggttagcggcctgcgcgtgcccgtgcgcacccgccccccgcgcaactagattgcaagaaaaaactacttagactcgtactgttgtatgtatccagcggcggcggcgcgcaacgaagctatgtccaagcgcaaaatcaaagaagagatgctccaggtcatcgcgccggagatctatggccccccgaagaaggaagagcaggattacaagccccgaaagctaaagcgggtcaaaaagaaaaagaaagatgatgatgatgaacttgacgacgaggtggaactgctgcacgctaccgcgcccaggcgacgggtacagtggaaaggtcgacgcgtaaaacgtgttttgcgacccggcaccaccgtagtctttacgcccggtgagcgctccacccgcacctacaagcgcgtgtatgatgaggtgtacggcgacgaggacctgcttgagcaggccaacgagcgcctcggggagtttgcctacggaaagcggcataaggacatgctggcgttgccgctggacgagggcaacccaacacctagcctaaagcccgtaacactgcagcaggtgctgcccgcgcttgcaccgtccgaagaaaagcgcggcctaaagcgcgagtctggtgacttggcacccaccgtgcagctgatggtacccaagcgccagcgactggaagatgtcttggaaaaaatgaccgtggaacctgggctggagcccgaggtccgcgtgcggccaatcaagcaggtggcgccgggactgggcgtgcagaccgtggacgttcagatacccactaccagtagcaccagtattgccaccgccacagagggcatggagacacaaacgtccccggttgcctcagcggtggcggatgccgcggtgcaggcggtcgctgcggccgcgtccaagacctctacggaggtgcaaacggacccgtggatgtttcgcgtttcagccccccggcgcccgcgccgttcgaggaagtacggcgccgccagcgcgctactgcccgaatatgccctacatccttccattgcgcctacccccggctatcgtggctacacctaccgccccagaagacgagcaactacccgacgccgaaccaccactggaacccgccgccgccgtcgccgtcgccagcccgtgctggccccgatttccgtgcgcagggtggctcgcgaaggaggcaggaccctggtgctgccaacagcgcgctaccaccccagcatcgtttaaaagccggtctttgtggttcttgcagatatggccctcacctgccgcctccgtttcccggtgccgggattccgaggaagaatgcaccgtaggaggggcatggccggccacggcctgacgggcggcatgcgtcgtgcgcaccaccggcggcggcgcgcgtcgcaccgtcgcatgcgcggcggtatcctgcccctccttattccactgatcgccgcggcgattggcgccgtgcccggaattgcatccgtggccttgcaggcgcagagacactgattaaaaacaagttgcatgtggaaaaatcaaaataaaaagtctggactctcacgctcgcttggtcctgtaactattttgtagaatggaagacatcaactttgcgtctctggccccgcgacacggctcgcgcccgttcatgggaaactggcaagatatcggcaccagcaatatgagcggtggcgccttcagctggggctcgctgtggagcggcattaaaaatttcggttccaccgttaagaactatggcagcaaggcctggaacagcagcacaggccagatgctgagggataagttgaaagagcaaaatttccaacaaaaggtggtagatggcctggcctctggcattagcggggtggtggacctggccaaccaggcagtgcaaaataagattaacagtaagcttgatccccgccctcccgtagaggagcctccaccggccgtggagacagtgtctccagaggggcgtggcgaaaagcgtccgcgccccgacagggaagaaactctggtgacgcaaatagacgagcctccctcgtacgaggaggcactaaagcaaggcctgcccaccacccgtcccatcgcgcccatggctaccggagtgctgggccagcacacacccgtaacgctggacctgcctccccccgccgacacccagcagaaacctgtgctgccaggcccgaccgccgttgttgtaacccgtcctagccgcgcgtccctgcgccgcgccgccagcggtccgcgatcgttgcggcccgtagccagtggcaactggcaaagcacactgaacagcatcgtgggtctgggggtgcaatccctgaagcgccgacgatgcttctgatagctaacgtgtcgtatgtgtgtcatgtatgcgtccatgtcgccgccagaggagctgctgagccgccgcgcgcccgctttccaagatggctaccccttcgatgatgccgcagtggtcttacatgcacatctcgggccaggacgcctcggagtacctgagccccgggctggtgcagtttgcccgcgccaccgagacgtacttcagcctgaataacaagtttagaaaccccacggtggcgcctacgcacgacgtgaccacagaccggtcccagcgtttgacgctgcggttcatccctgtggaccgtgaggatactgcgtactcgtacaaggcgcggttcaccctagctgtgggtgataaccgtgtgctggacatggcttccacgtactttgacatccgcggcgtgctggacaggggccctacttttaagccctactctggcactgcctacaacgccctggctcccaagggtgccccaaatccttgcgaatgggatgaagctgctactgctcttgaaataaacctagaagaagaggacgatgacaacgaagacgaagtagacgagcaagctgagcagcaaaaaactcacgtatttgggcaggcgccttattctggtataaatattacaaaggagggtattcaaataggtgtcgaaggtcaaacacctaaatatgccgataaaacatttcaacctgaacctcaaataggagaatctcagtggtacgaaacagaaattaatcatgcagctgggagagtcctaaaaaagactaccccaatgaaaccatgttacggttcatatgcaaaacccacaaatgaaaatggagggcaaggcattcttgtaaagcaacaaaatggaaagctagaaagtcaagtggaaatgcaatttttctcaactactgaggcagccgcaggcaatggtgataacttgactcctaaagtggtattgtacagtgaagatgtagatatagaaaccccagacactcatatttcttacatgcccactattaaggaaggtaactcacgagaactaatgggccaacaatctatgcccaacaggcctaattacattgcttttagggacaattttattggtctaatgtattacaacagcacgggtaatatgggtgttctggcgggccaagcatcgcagttgaatgctgttgtagatttgcaagacagaaacacagagctttcataccagcttttgcttgattccattggtgatagaaccaggtacttttctatgtggaatcaggctgttgacagctatgatccagatgttagaattattgaaaatcatggaactgaagatgaacttccaaattactgctttccactgggaggtgtgattaatacagagactcttaccaaggtaaaacctaaaacaggtcaggaaaatggatgggaaaaagatgctacagaattttcagataaaaatgaaataagagttggaaataattttgccatggaaatcaatctaaatgccaacctgtggagaaatttcctgtactccaacatagcgctgtatttgcccgacaagctaaagtacagtccttccaacgtaaaaatttctgataacccaaacacctacgactacatgaacaagcgagtggtggctcccgggctagtggactgctacattaaccttggagcacgctggtcccttgactatatggacaacgtcaacccatttaaccaccaccgcaatgctggcctgcgctaccgctcaatgttgctgggcaatggtcgctatgtgcccttccacatccaggtgcctcagaagttctttgccattaaaaacctccttctcctgccgggctcatacacctacgagtggaacttcaggaaggatgttaacatggttctgcagagctccctaggaaatgacctaagggttgacggagccagcattaagtttgatagcatttgcctttacgccaccttcttccccatggcccacaacaccgcctccacgcttgaggccatgcttagaaacgacaccaacgaccagtcctttaacgactatctctccgccgccaacatgctctaccctatacccgccaacgctaccaacgtgcccatatccatcccctcccgcaactgggcggctttccgcggctgggccttcacgcgccttaagactaaggaaaccccatcactgggctcgggctacgacccttattacacctactctggctctataccctacctagatggaaccttttacctcaaccacacctttaagaaggtggccattacctttgactcttctgtcagctggcctggcaatgaccgcctgcttacccccaacgagtttgaaattaagcgctcagttgacggggagggttacaacgttgcccagtgtaacatgaccaaagactggttcctggtacaaatgctagctaactataacattggctaccagggcttctatatcccagagagctacaaggaccgcatgtactccttctttagaaacttccagcccatgagccgtcaggtggtggatgatactaaatacaaggactaccaacaggtgggcatcctacaccaacacaacaactctggatttgttggctaccttgcccccaccatgcgcgaaggacaggcctaccctgctaacttcccctatccgcttataggcaagaccgcagttgacagcattacccagaaaaagtttctttgcgatcgcaccctttggcgcatcccattctccagtaactttatgtccatgggcgcactcacagacctgggccaaaaccttctctacgccaactccgcccacgcgctagacatgacttttgaggtggatcccatggacgagcccacccttctttatgttttgtttgaagtctttgacgtggtccgtgtgcaccagccgcaccgcggcgtcatcgaaaccgtgtacctgcgcacgcccttctcggccggcaacgccacaacataaagaagcaagcaacatcaacaacagctgccgccatgggctccagtgagcaggaactgaaagccattgtcaaagatcttggttgtgggccatattttttgggcacctatgacaagcgctttccaggctttgtttctccacacaagctcgcctgcgccatagtcaatacggccggtcgcgagactgggggcgtacactggatggcctttgcctggaacccgcactcaaaaacatgctacctctttgagccctttggcttttctgaccagcgactcaagcaggtttaccagtttgagtacgagtcactcctgcgccgtagcgccattgcttcttcccccgaccgctgtataacgctggaaaagtccacccaaagcgtacaggggcccaactcggccgcctgtggactattctgctgcatgtttctccacgcctttgccaactggccccaaactcccatggatcacaaccccaccatgaaccttattaccggggtacccaactccatgctcaacagtccccaggtacagcccaccctgcgtcgcaaccaggaacagctctacagcttcctggagcgccactcgccctacttccgcagccacagtgcgcagattaggagcgccacttctttttgtcacttgaaaaacatgtaaaaataatgtactagagacactttcaataaaggcaaatgcttttatttgtacactctcgggtgattatttacccccacccttgccgtctgcgccgtttaaaaatcaaaggggttctgccgcgcatcgctatgcgccactggcagggacacgttgcgatactggtgtttagtgctccacttaaactcaggcacaaccatccgcggcagctcggtgaagttttcactccacaggctgcgcaccatcaccaacgcgtttagcaggtcgggcgccgatatcttgaagtcgcagttggggcctccgccctgcgcgcgcgagttgcgatacacagggttgcagcactggaacactatcagcgccgggtggtgcacgctggccagcacgctcttgtcggagatcagatccgcgtccaggtcctccgcgttgctcagggcgaacggagtcaactttggtagctgccttcccaaaaagggcgcgtgcccaggctttgagttgcactcgcaccgtagtggcatcaaaaggtgaccgtgcccggtctgggcgttaggatacagcgcctgcataaaagccttgatctgcttaaaagccacctgagcctttgcgccttcagagaagaacatgccgcaagacttgccggaaaactgattggccggacaggccgcgtcgtgcacgcagcaccttgcgtcggtgttggagatctgcaccacatttcggccccaccggttcttcacgatcttggccttgctagactgctccttcagcgcgcgctgcccgttttcgctcgtcacatccatttcaatcacgtgctccttatttatcataatgcttccgtgtagacacttaagctcgccttcgatctcagcgcagcggtgcagccacaacgcgcagcccgtgggctcgtgatgcttgtaggtcacctctgcaaacgactgcaggtacgcctgcaggaatcgccccatcatcgtcacaaaggtcttgttgctggtgaaggtcagctgcaacccgcggtgctcctcgttcagccaggtcttgcatacggccgccagagcttccacttggtcaggcagtagtttgaagttcgcctttagatcgttatccacgtggtacttgtccatcagcgcgcgcgcagcctccatgcccttctcccacgcagacacgatcggcacactcagcgggttcatcaccgtaatttcactttccgcttcgctgggctcttcctcttcctcttgcgtccgcataccacgcgccactgggtcgtcttcattcagccgccgcactgtgcgcttacctcctttgccatgcttgattagcaccggtgggttgctgaaacccaccatttgtagcgccacatcttctctttcttcctcgctgtccacgattacctctggtgatggcgggcgctcgggcttgggagaagggcgcttctttttcttcttgggcgcaatggccaaatccgccgccgaggtcgatggccgcgggctgggtgtgcgcggcaccagcgcgtcttgtgatgagtcttcctcgtcctcggactcgatacgccgcctcatccgcttttttgggggcgcccggggaggcggcggcgacggggacggggacgacacgtcctccatggttgggggacgtcgcgccgcaccgcgtccgcgctcgggggtggtttcgcgctgctcctcttcccgactggccatttccttctcctataggcagaaaaagatcatggagtcagtcgagaagaaggacagcctaaccgccccctctgagttcgccaccaccgcctccaccgatgccgccaacgcgcctaccaccttccccgtcgaggcacccccgcttgaggaggaggaagtgattatcgagcaggacccaggttttgtaagcgaagacgacgaggaccgctcagtaccaacagaggataaaaagcaagaccaggacaacgcagaggcaaacgaggaacaagtcgggcggggggacgaaaggcatggcgactacctagatgtgggagacgacgtgctgttgaagcatctgcagcgccagtgcgccattatctgcgacgcgttgcaagagcgcagcgatgtgcccctcgccatagcggatgtcagccttgcctacgaacgccacctattctcaccgcgcgtaccccccaaacgccaagaaaacggcacatgcgagcccaacccgcgcctcaacttctaccccgtatttgccgtgccagaggtgcttgccacctatcacatctttttccaaaactgcaagatacccctatcctgccgtgccaaccgcagccgagcggacaagcagctggccttgcggcagggcgctgtcatacctgatatcgcctcgctcaacgaagtgccaaaaatctttgagggtcttggacgcgacgagaagcgcgcggcaaacgctctgcaacaggaaaacagcgaaaatgaaagtcactctggagtgttggtggaactcgagggtgacaacgcgcgcctagccgtactaaaacgcagcatcgaggtcacccactttgcctacccggcacttaacctaccccccaaggtcatgagcacagtcatgagtgagctgatcgtgcgccgtgcgcagcccctggagagggatgcaaatttgcaagaacaaacagaggagggcctacccgcagttggcgacgagcagctagcgcgctggcttcaaacgcgcgagcctgccgacttggaggagcgacgcaaactaatgatggccgcagtgctcgttaccgtggagcttgagtgcatgcagcggttctttgctgacccggagatgcagcgcaagctagaggaaacattgcactacacctttcgacagggctacgtacgccaggcctgcaagatctccaacgtggagctctgcaacctggtctcctaccttggaattttgcacgaaaaccgccttgggcaaaacgtgcttcattccacgctcaagggcgaggcgcgccgcgactacgtccgcgactgcgtttacttatttctatgctacacctggcagacggccatgggcgtttggcagcagtgcttggaggagtgcaacctcaaggagctgcagaaactgctaaagcaaaacttgaaggacctatggacggccttcaacgagcgctccgtggccgcgcacctggcggacatcattttccccgaacgcctgcttaaaaccctgcaacagggtctgccagacttcaccagtcaaagcatgttgcagaactttaggaactttatcctagagcgctcaggaatcttgcccgccacctgctgtgcacttcctagcgactttgtgcccattaagtaccgcgaatgccctccgccgctttggggccactgctaccttctgcagctagccaactaccttgcctaccactctgacataatggaagacgtgagcggtgacggtctactggagtgtcactgtcgctgcaacctatgcaccccgcaccgctccctggtttgcaattcgcagctgcttaacgaaagtcaaattatcggtacctttgagctgcagggtccctcgcctgacgaaaagtccgcggctccggggttgaaactcactccggggctgtggacgtcggcttaccttcgcaaatttgtacctgaggactaccacgcccacgagattaggttctacgaagaccaatcccgcccgcctaatgcggagcttaccgcctgcgtcattacccagggccacattcttggccaattgcaagccatcaacaaagcccgccaagagtttctgctacgaaagggacggggggtttacttggacccccagtccggcgaggagctcaacccaatccccccgccgccgcagccctatcagcagcagccgcgggcccttgcttcccaggatggcacccaaaaagaagctgcagctgccgccgccacccacggacgaggaggaatactgggacagtcaggcagaggaggttttggacgaggaggaggaggacatgatggaagactgggagagcctagacgaggaagcttccgaggtcgaagaggtgtcagacgaaacaccgtcaccctcggtcgcattcccctcgccggcgccccagaaatcggcaaccggttccagcatggctacaacctccgctcctcaggcgccgccggcactgcccgttcgccgacccaaccgtagatgggacaccactggaaccagggccggtaagtccaagcagccgccgccgttagcccaagagcaacaacagcgccaaggctaccgctcatggcgcgggcacaagaacgccatagttgcttgcttgcaagactgtgggggcaacatctccttcgcccgccgctttcttctctaccatcacggcgtggccttcccccgtaacatcctgcattactaccgtcatctctacagcccatactgcaccggcggcagcggcagcaacagcagcggccacacagaagcaaaggcgaccggatagcaagactctgacaaagcccaagaaatccacagcggcggcagcagcaggaggaggagcgctgcgtctggcgcccaacgaacccgtatcgacccgcgagcttagaaacaggatttttcccactctgtatgctatatttcaacagagcaggggccaagaacaagagctgaaaataaaaaacaggtctctgcgatccctcacccgcagctgcctgtatcacaaaagcgaagatcagcttcggcgcacgctggaagacgcggaggctctcttcagtaaatactgcgcgctgactcttaaggactagtttcgcgccctttctcaaatttaagcgcgaaaactacgtcatctccagcggccacacccggcgccagcacctgttgtcagcgccattatgagcaaggaaattcccacgccctacatgtggagttaccagccacaaatgggacttgcggctggagctgcccaagactactcaacccgaataaactacatgagcgcgggaccccacatgatatcccgggtcaacggaatacgcgcccaccgaaaccgaattctcctggaacaggcggctattaccaccacacctcgtaataaccttaatccccgtagttggcccgctgccctggtgtaccaggaaagtcccgctcccaccactgtggtacttcccagagacgcccaggccgaagttcagatgactaactcaggggcgcagcttgcgggcggctttcgtcacagggtgcggtcgcccgggcagggtataactcacctgacaatcagagggcgaggtattcagctcaacgacgagtcggtgagctcctcgcttggtctccgtccggacgggacatttcagatcggcggcgccggccgctcttcattcacgcctcgtcaggcaatcctaactctgcagacctcgtcctctgagccgcgctctggaggcattggaactctgcaatttattgaggagtttgtgccatcggtctactttaaccccttctcgggacctcccggccactatccggatcaatttattcctaactttgacgcggtaaaggactcggcggacggctacgactgaatgttaagtggagaggcagagcaactgcgcctgaaacacctggtccactgtcgccgccacaagtgctttgcccgcgactccggtgagttttgctactttgaattgcccgaggatcatatcgagggcccggcgcacggcgtccggcttaccgcccagggagagcttgcccgtagcctgattcgggagtttacccagcgccccctgctagttgagcgggacaggggaccctgtgttctcactgtgatttgcaactgtcctaaccctggattacatcaagatcctctagttaatgtcaggtcgcctaagtcgattaactagagtacccggggatcttattccctttaactaataaaaaaaaataataaagcatcacttacttaaaatcagttagcaaatttctgtccagtttattcagcagcacctccttgccctcctcccagctctggtattgcagcttcctcctggctgcaaactttctccacaatctaaatggaatgtcagtttcctcctgttcctgtccatccgcacccactatcttcatgttgttgcagatgaagcgcgcaagaccgtctgaagataccttcaaccccgtgtatccatatgacacggaaaccggtcctccaactgtgccttttcttactcctccctttgtatcccccaatgggtttcaagagagtccccctggggtactctctttgcgcctatccgaacctctagttacctccaatggcatgcttgcgctcaaaatgggcaacggcctctctctggacgaggccggcaaccttacctcccaaaatgtaaccactgtgagcccacctctcaaaaaaaccaagtcaaacataaacctggaaatatctgcacccctcacagttacctcagaagccctaactgtggctgccgccgcacctctaatggtcgcgggcaacacactcaccatgcaatcacaggccccgctaaccgtgcacgactccaaacttagcattgccacccaaggacccctcacagtgtcagaaggaaagctagccctgcaaacatcaggccccctcaccaccaccgatagcagtacccttactatcactgcctcaccccctctaactactgccactggtagcttgggcattgacttgaaagagcccatttatacacaaaatggaaaactaggactaaagtacggggctcctttgcatgtaacagacgacctaaacactttgaccgtagcaactggtccaggtgtgactattaataatacttccttgcaaactaaagttactggagccttgggttttgattcacaaggcaatatgcaacttaatgtagcaggaggactaaggattgattctcaaaacagacgccttatacttgatgttagttatccgtttgatgctcaaaaccaactaaatctaagactaggacagggccctctttttataaactcagcccacaacttggatattaactacaacaaaggcctttacttgtttacagcttcaaacaattccaaaaagcttgaggttaacctaagcactgccaaggggttgatgtttgacgctacagccatagccattaatgcaggagatgggcttgaatttggttcacctaatgcaccaaacacaaatcccctcaaaacaaaaattggccatggcctagaatttgattcaaacaaggctatggttcctaaactaggaactggccttagttttgacagcacaggtgccattacagtaggaaacaaaaataatgataagctaactttgtggaccggaataaaccctccacctaactgtcaaattgtggaaaacactaatacaaatgatggcaaacttactttagtattagtaaaaaatggagggcttgttaatggctacgtgtctctagttggtgtatcagacactgtgaaccaaatgttcacacaaaagacagcaaacatccaattaagattatattttgactcttctggaaatctattaactgaggaatcagacttaaaaattccacttaaaaataaatcttctacagcgaccagtgaaactgtagccagcagcaaagcctttatgccaagtactacagcttatcccttcaacaccactactagggatagtgaaaactacattcatggaatatgttactacatgactagttatgatagaagtctatttcccttgaacatttctataatgctaaacagccgtatgatttcttccaatgttgcctatgccatacaatttgaatggaatctaaatgcaagtgaatctccagaaagcaacatagctacgctgaccacatccccctttttcttttcttacattacagaagacgacaactaaagaatcgtttgtgttatgtttcaacgtgtttatttttcaattgcagaaaatttcaagtcatttttcattcagtagtatagccccaccaccacatagcttatacagatcaccgtaccttaatcaaactcacagaaccctagtattcaacctgccacctccctcccaacacacagagtacacagtcctttctccccggctggccttaaaaagcatcatatcatgggtaacagacatattcttaggtgttatattccacacggtttcctgtcgagccaaacgctcatcagtgatattaataaactccccgggcagctcacttaagttcatgtcgctgtccagctgctgagccacaggctgctgtccaacttgcggttgcttaacgggcggcgaaggagaagtccacgctcagtagattaagtggcgacccctcataaacacgctggacataaacattacctcttttggcatgttgtaattcaccacctcccggtaccatataaacctctgattaaacatggcgccatccaccaccatcctaaaccagctggccaaaacctgcccgccggctatacactgcagggaaccgggactggaacaatgacagtggagagcccaggactcgtaaccatggatcatcatgctcgtcatgatatcaatgttggcacaacacaggcacacgtgcatacacttcctcaggattacaagctcctcccgcgttagaaccatatcccagggaacaacccattcctgaatcagcgtaaatcccacactgcagggaagacctcgcacgtaactcacgttgtgcattgtcaaagtgttacattcgggcagcagcggatgatcctccagtatggtagcgcgggtttctgtctcaaaaggaggtagacgatccctactgtacggagtgcgccgagacaaccgagatcgtgttggtcgtagtgtcatgccaaatggaacgccggacgtagtcatatttcctgaagcaaaaccaggtgcgggcgtgacaaacagatctgcgtctccggtctcgccgcttagatcgctctgtgtagtagttgtagtatatccactctctcaaagcatccaggcgccccctggcttcgggttctatgtaaactccttcatgcgccgctgccctgataacatccaccaccgcagaataagccacacccagccaacctacacattcgttctgcgagtcacacacgggaggagcgggaagagctggaagaaccatgtttttttttttattccaaaagattatccaaaacctcaaaatgaagatctattaagtgaacgcgctcccctccggtggcgtggtcaaactctacagccaaagaacagataatggcatttgtaagatgttgcacaatggcttccaaaaggcaaacggccctcacgtccaagtggacgtaaaggctaaacccttcagggtgaatctcctctataaacattccagcaccttcaaccatgcccaaataattctcatctcgccaccttctcaatatatctctaagcaaatcccgaatattaagtccggccattgtaaaaatctgctccagagcgccctccaccttcagcctcaagcagcgaatcatgattgcaaaaattcaggttcctcacagacctgtataagattcaaaagcggaacattaacaaaaataccgcgatcccgtaggtcccttcgcagggccagctgaacataatcgtgcaggtctgcacggaccagcgcggccacttccccgccaggaaccatgacaaaagaacccacactgattatgacacgcatactcggagctatgctaaccagcgtagccccgatgtaagcttgttgcatgggcggcgatataaaatgcaaggtgctgctcaaaaaatcaggcaaagcctcgcgcaaaaaagaaagcacatcgtagtcatgctcatgcagataaaggcaggtaagctccggaaccaccacagaaaaagacaccatttttctctcaaacatgtctgcgggtttctgcataaacacaaaataaaataacaaaaaaacatttaaacattagaagcctgtcttacaacaggaaaaacaacccttataagcataagacggactacggccatgccggcgtgaccgtaaaaaaactggtcaccgtgattaaaaagcaccaccgacagctcctcggtcatgtccggagtcataatgtaagactcggtaaacacatcaggttgattcacatcggtcagtgctaaaaagcgaccgaaatagcccgggggaatacatacccgcaggcgtagagacaacattacagcccccataggaggtataacaaaattaataggagagaaaaacacataaacacctgaaaaaccctcctgcctaggcaaaatagcaccctcccgctccagaacaacatacagcgcttccacagcggcagccataacagtcagccttaccagtaaaaaagaaaacctattaaaaaaacaccactcgacacggcaccagctcaatcagtcacagtgtaaaaaagggccaagtgcagagcgagtatatataggactaaaaaatgacgtaacggttaaagtccacaaaaaacacccagaaaaccgcacgcgaacctacgcccagaaacgaaagccaaaaaacccacaacttcctcaaatcgtcacttccgttttcccacgttacgtcacttcccattttaagaaaactacaattcccaacacatacaagttactccgccctaaaacctacgtcacccgccccgttcccacgccccgcgccacgtcacaaactccaccccctcattatcatattggcttcaatccaaaataaggtatattattgatgatg

SEQ ID NO: 46 - DNA, 35750 bp, Artificial Sequence
  Adk35RF-Spike/E4orf6(RSV)-E4dl-421(E4re#44)
ttaattaacatcatcaataatataccttattttggattgaagccaatatgataatgagggggtggagtttgtgacgtggcgcggggcgtgggaacggggcgggtgacgtagtagtgtggcggaagtgtgatgttgcaagtgtggcggaacacatgtaagcgacggatgtggcaaaagtgacgtttttggtgtgcgccggtgtacacaggaagtgacaattttcgcgcggttttaggcggatgttgtagtaaatttgggcgtaaccgagtaagatttggccattttcgcgggaaaactgaataagaggaagtgaaatctgaataattttgtgttactcatagcgcgtaataatttgatccgcgttaagatacattgatgagtttggacaaaccacaactagaatgcagtgaaaaaaatgctttatttgtgaaatttgtgatgctattgctttatttgtaaccattataagctgcaataaacaagttaacaacaacaattgcattcattttatgtttcaggttcagggggaggtgtgggaggttttttaaagcaagtaaaacctctacaaatgtggtatggctgattatgatcaattttcatggccacttgatgtattgttcatatttgcccagttcttggaggtcaatcagggactcattcaggttcttagccacctcattcagtctgtcaatctccttctggatgttcaccacagaggcattgatgccagagatgtctcccaggtccacatcagggctggtgtggttcttgaagtatttgtccagttcctccttgaaggagtccagttcaggttggagtgggtcatagactgtgttgttcacaatgccaatcaccacatcacagttgccagacacaaaggtgttgtctgtggtgataatctgtggttcatagaagttcctctgggtcacaaaccagtgggtgccattgctcacaaacactccctcccttggaaagtgagccttgccatcatggcagatggcaggggctgtggtgaagttcttctcctgggcaggcacataggtcacatgcaggaacaccactccatgaggggcagactgtggaaaactcatcaggtggtagcccttgccacagaagtccaccctcttgctttgtcccagcacacactcactcatcttggtggcagccaggttggcagatgccctaatctcagcagccctgataagttgttgggtcacataggtttggagggattggagtctgcctgtaatcagtctgtcaatctggacctcagcctccaccttgtccagtctgctcaggatgtcattcagcacagaggagatggctccaaagttgctggaaagttgcttcaccagggtgttcagagcctgggcattctggttcaccacatcttggagtttgcccagggcagaggctgtgctggacagggagtcctgaatcttgccaatggcagagttgaactggttggcaatcagtttctggttctcatagagcacattctgggtcactccaatgccattgaacctgtaagccatctgcatagcaaatgggatttggagggctgctcctgctccaaaggtccagccagaggtgatggtgccagccagcagggcagaggtgtattgggcaatcatctcatctgtcagcagtggaggcagcactgtcagtccattgaacttctgggcacaaatcaggtccctggcagcaatgtctcccagacagtctccatattgcttgatgaagccagcatcagccagggtcaccttgttgaacagcaggtcctcaatgaaggacctcttgcttggcttgcttgggtcaggcagaatctggctgaagttgaagcctccaaagtccttgattggaggtgtcttgtaaatctgcttcacctgggcaaacacctcctgggtgttcttgtcctgttccacagcaatgcctgtcagagccctgttaagttgggtacagaaggagccatattggagcagcaggttgctacactctgtgctgtctccacagatatacattgtacagtccacagaggtcttggtcatactcacaggcagaatctctgtggtcacagagatggtgaagttggttgggatggcaatgctgttgttgctgtaagccacagagttctctgctcccagactcattgtgtaggcaatgatgctctggcttgccacagacctcgacccaccgccaccggtctgggtctggtaggaggcacagatgcctgctccaattgggatgtcacactcataggagttgttcacatgctctgctccaatcagacagccagccctggtctggaacacattgctgcctgtgctgtagaccctccaggttggtgtaagttggtcagcatggatagccacaggcacctcagtacagttcacatcctggtagagcacagccacctggttgctggtgttggtgccaggtgtaatcacagacactcctccaaaggaacatggtgtgatgtccagaatctccaaggtctgtgggtccctcacagcatctgtggtgtcagcaatgtccctgccaaactgttggaatggcaggaacttcttgttgctctctgtcagcactcctgtgcctgtcagtccattgaagttgaagttcacacacttgttcttcaccaggttggtgctcttctttggtccacacactgtggcaggggcatggagcagttcaaaggacagcaccaccaccctgtatggttggtagcccactccattggttggttggaagccataggattggagtggaaagtaacagttgaagccctccactccattacatggtgtgctgccagcctggtaaatctctgtgctgatgtccctctcaaatggtttcaggttgctcttcctgaacagtctgtagaggtagttgtagttgcctcccaccttgctgtccaggttgttgctgttccaggcaatcacacagcctgtgaagtcatcaggcagtttgtagttgtagtcagcaatcttgcctgtttgtccaggggcaatctgtctcacctcatctcccctaatcacaaaggagtcagcatagacattggtgaaacacaggtcattcagtttggttgggctcactccataacacttgaaggtgctgaaggaggcagagttgtagagcacagagtagtcagccacacagttgctaatcctcttcctgttccaggcatagacagaggcaaacctggtggcattgaacacctctccaaatggacacaggttggtgatgtttggaaacctcacaatgctctctgttggttggaccctgaagttgctggtctggtagatgcccttctccactgtgaaggatttcagggtacacttggtctcagacagtgggtccagggcacagtccacagcatctgtgatggtgccattctcattgtatttcagcaggaaggtccttggttggaggtagcccacatagtaggctgctgctcctgctgtccagccagaggaggagtctccaggtgtcaggtaggacctgtgcagagccagcagggtctggaacctggtgatgttgatgccaattggcaggtccaccagtggttccaaggcagagaagccctgtggcaggtccctcaccaggttgattggtgtgtgtttgctgtaaatcttgaagtagccatcaatgttcttgaacacaaactccctcaggttcttgaagttgccctgcttgccctccaagtccatcaggaatggttggctcacatattcaaaggtacagttgttggcagaggagtagaccctgaactcagactccatccaggacttgttgttcttgtggtagtagactcccaggaatgggtcattacagaactggaactcacacaccttaatcaccacattggtggcattgttcacaatcagcagggactgggtcttgctgtccagggtggtgccaaaaatccagcccctgatgatgttgctcttctctgtgctggcaaagtagactccatcattgaatggcagcacagggttgtcaaacctcttggtgccattggtgccagacacatggatggcatggaaccaggtcacattgctgaagaatggcaggaacaggtcctgggtgctgtgcagcacagaggacctgaacaccttgtcagggtagtagactcccctggtgaaggagttggtgtaggcaggaggaagttgggtcctggtggtcaggttcacacactggctggacaccagtggcagcagcaccaggaacacaaacatggtggcaaatcggaggctggatcggtcccggtgtcttctatggaggtcaaaacagcgtggatggcgtctccaggcgatctgacggttcactaaacgagctcgtcgacgatctctatcactgatagggagatctctatcactgatagggagagctctgcttatatagacctcccaccgtacacgcctaccgcccatttgcgtcaatggggcggagttgttacgacattttggaaagtcccgttgattttggtgccaaaacaaactcccattgacgtcaatggggtggagacttggaaatccccgtgagtcaaaccgctatccacgcccattgatgtactgccaaaaccgcatcaccatggtaatagcgatgactaatacgtagatgtactgccaagtaggaaagtcccataaggtcatgtactgggcataatgccaggcgggccatttaccgtcattgacgtcaatagggggcgtacttggcatatgatacacttgatgtactgccaagtgggcagtttaccgtaaatactccacccattgacgtcaatggaaagtccctattggcgttactatgggaacatacgtcattattgacgtcaatgggcgggggtcgttgggcggtcagccaggcgggccatttaccgtaagttatgtaacgcggaactccatatatgggctatgaactaatgaccccgtaattgattactattacagtgtagtcttatgcaatactcttgtagtcttgcaacatggtaacgatgagttagcaacatgccttacaaggagagaaaaagcaccgtgcatgccgattggtggaagtaaggtggtacgatcgtgccttattaggaaggcaacagacgggtctgacatggattggacgaaccactgaattgccgcattgcagagatattgtatttaagtgcctagctcgatacataaacaaactaccccaagctggccaccatgactacgtccggcgttccatttggcatgacactacgaccaacacgatctcggttgtctcggcgcactccgtacagtagggatcgtctacctccttttgagacagaaacccgcgctaccatactggaggatcatccgctgctgcccgaatgtaacactttgacaatgcacaacgtgagttacgtgcgaggtcttccctgcagtgtgggatttacgctgattcaggaatgggttgttccctgggatatggttctaacgcgggaggagcttgtaatcctgaggaagtgtatgcacgtgtgcctgtgttgtgccaacattgatatcatgacgagcatgatgatccatggttacgagtcctgggctctccactgtcattgttccagtcccggttccctgcagtgtatagccggcgggcaggttttggccagctggtttaggatggtggtggatggcgccatgtttaatcagaggtttatatggtaccgggaggtggtgaattacaacatgccaaaagaggtaatgtttatgtccagcgtgtttatgaggggtcgccacttaatctacctgcgcttgtggtatgatggccacgtgggttctgtggtccccgccatgagctttggatacagcgccttgcactgtgggattttgaacaatattgtggtgctgtgctgcagttactgtgctgatttaagtgagatcagggtgcgctgctgtgcccggaggacaaggcgccttatgctgcgggcggtgcgaatcatcgctgaggagaccactgccatgttgtattcctgcaggacggagcggcggcggcagcagtttattcgcgcgctgctgcagcaccaccgccctatcctgatgcacgattatgactctacccccatgtagaagcttggggatcaattctctagagctcgctgatcagcctcgactgtgccttctagttgccagccatctgttgtttgcccctcccccgtgccttccttgaccctggaaggtgccactcccactgtcctttcctaataaaatgaggaaattgcatcgcattgtctgagtaggtgtcattctattctggggggtggggtggggcaggacagcaagggggaggattgggaagacaatagcaggcatgctggggatgcggtgggctctatggcttctgaggaaattgggcgtggcttaagggtgggaaagaatatataaggtgggggtcttatgtagttttgtatctgttttgcagcagccgccgccgccatgagcaccaactcgtttgatggaagcattgtgagctcatatttgacaacgcgcatgcccccatgggccggggtgcgtcagaatgtgatgggctccagcattgatggtcgccccgtcctgcccgcaaactctactaccttgacctacgagaccgtgtctggaacgccgttggagactgcagcctccgccgccgcttcagccgctgcagccaccgcccgcgggattgtgactgactttgctttcctgagcccgcttgcaagcagtgcagcttcccgttcatccgcccgcgatgacaagttgacggctcttttggcacaattggattctttgacccgggaacttaatgtcgtttctcagcagctgttggatctgcgccagcaggtttctgccctgaaggcttcctcccctcccaatgcggtttaaaacataaataaaaaaccagactctgtttggatttggatcaagcaagtgtcttgctgtctttatttaggggttttgcgcgcgcggtaggcccgggaccagcggtctcggtcgttgagggtcctgtgtattttttccaggacgtggtaaaggtgactctggatgttcagatacatgggcataagcccgtctctggggtggaggtagcaccactgcagagcttcatgctgcggggtggtgttgtagatgatccagtcgtagcaggagcgctgggcgtggtgcctaaaaatgtctttcagtagcaagctgattgccaggggcaggcccttggtgtaagtgtttacaaagcggttaagctgggatgggtgcatacgtggggatatgagatgcatcttggactgtatttttaggttggctatgttcccagccatatccctccggggattcatgttgtgcagaaccaccagcacagtgtatccggtgcacttgggaaatttgtcatgtagcttagaaggaaatgcgtggaagaacttggagacgcccttgtgacctccaagattttccatgcattcgtccataatgatggcaatgggcccacgggcggcggcctgggcgaagatatttctgggatcactaacgtcatagttgtgttccaggatgagatcgtcataggccatttttacaaagcgcgggcggagggtgccagactgcggtataatggttccatccggcccaggggcgtagttaccctcacagatttgcatttcccacgctttgagttcagatggggggatcatgtctacctgcggggcgatgaagaaaacggtttccggggtaggggagatcagctgggaagaaagcaggttcctgagcagctgcgacttaccgcagccggtgggcccgtaaatcacacctattaccggctgcaactggtagttaagagagctgcagctgccgtcatccctgagcaggggggccacttcgttaagcatgtccctgactcgcatgttttccctgaccaaatccgccagaaggcgctcgccgcccagcgatagcagttcttgcaaggaagcaaagtttttcaacggtttgagaccgtccgccgtaggcatgcttttgagcgtttgaccaagcagttccaggcggtcccacagctcggtcacctgctctacggcatctcgatccagcatatctcctcgtttcgcgggttggggcggctttcgctgtacggcagtagtcggtgctcgtccagacgggccagggtcatgtctttccacgggcgcagggtcctcgtcagcgtagtctgggtcacggtgaaggggtgcgctccgggctgcgcgctggccagggtgcgcttgaggctggtcctgctggtgctgaagcgctgccggtcttcgccctgcgcgtcggccaggtagcatttgaccatggtgtcatagtccagcccctccgcggcgtggcccttggcgcgcagcttgcccttggaggaggcgccgcacgaggggcagtgcagacttttgagggcgtagagcttgggcgcgagaaataccgattccggggagtaggcatccgcgccgcaggccccgcagacggtctcgcattccacgagccaggtgagctctggccgttcggggtcaaaaaccaggtttcccccatgctttttgatgcgtttcttacctctggtttccatgagccggtgtccacgctcggtgacgaaaaggctgtccgtgtccccgtatacagacttgagaggcctgtcctcgagcggtgttccgcggtcctcctcgtatagaaactcggaccactctgagacaaaggctcgcgtccaggccagcacgaaggaggctaagtgggaggggtagcggtcgttgtccactagggggtccactcgctccagggtgtgaagacacatgtcgccctcttcggcatcaaggaaggtgattggtttgtaggtgtaggccacgtgaccgggtgttcctgaaggggggctataaaagggggtgggggcgcgttcgtcctcactctcttccgcatcgctgtctgcgagggccagctgttggggtgagtactccctctgaaaagcgggcatgacttctgcgctaagattgtcagtttccaaaaacgaggaggatttgatattcacctggcccgcggtgatgcctttgagggtggccgcatccatctggtcagaaaagacaatctttttgttgtcaagcttggtggcaaacgacccgtagagggcgttggacagcaacttggcgatggagcgcagggtttggtttttgtcgcgatcggcgcgctccttggccgcgatgtttagctgcacgtattcgcgcgcaacgcaccgccattcgggaaagacggtggtgcgctcgtcgggcaccaggtgcacgcgccaaccgcggttgtgcagggtgacaaggtcaacgctggtggctacctctccgcgtaggcgctcgttggtccagcagaggcggccgcccttgcgcgagcagaatggcggtagggggtctagctgcgtctcgtccggggggtctgcgtccacggtaaagaccccgggcagcaggcgcgcgtcgaagtagtctatcttgcatccttgcaagtctagcgcctgctgccatgcgcgggcggcaagcgcgcgctcgtatgggttgagtgggggaccccatggcatggggtgggtgagcgcggaggcgtacatgccgcaaatgtcgtaaacgtagaggggctctctgagtattccaagatatgtagggtagcatcttccaccgcggatgctggcgcgcacgtaatcgtatagttcgtgcgagggagcgaggaggtcgggaccgaggttgctacgggcgggctgctctgctcggaagactatctgcctgaagatggcatgtgagttggatgatatggttggacgctggaagacgttgaagctggcgtctgtgagacctaccgcgtcacgcacgaaggaggcgtaggagtcgcgcagcttgttgaccagctcggcggtgacctgcacgtctagggcgcagtagtccagggtttccttgatgatgtcatacttatcctgtcccttttttttccacagctcgcggttgaggacaaactcttcgcggtctttccagtactcttggatcggaaacccgtcggcctccgaacggtaagagcctagcatgtagaactggttgacggcctggtaggcgcagcatcccttttctacgggtagcgcgtatgcctgcgcggccttccggagcgaggtgtgggtgagcgcaaaggtgtccctgaccatgactttgaggtactggtatttgaagtcagtgtcgtcgcatccgccctgctcccagagcaaaaagtccgtgcgctttttggaacgcggatttggcagggcgaaggtgacatcgttgaagagtatctttcccgcgcgaggcataaagttgcgtgtgatgcggaagggtcccggcacctcggaacggttgttaattacctgggcggcgagcacgatctcgtcaaagccgttgatgttgtggcccacaatgtaaagttccaagaagcgcgggatgcccttgatggaaggcaattttttaagttcctcgtaggtgagctcttcaggggagctgagcccgtgctctgaaagggcccagtctgcaagatgagggttggaagcgacgaatgagctccacaggtcacgggccattagcatttgcaggtggtcgcgaaaggtcctaaactggcgacctatggccattttttctggggtgatgcagtagaaggtaagcgggtcttgttcccagcggtcccatccaaggttcgcggctaggtctcgcgcggcagtcactagaggctcatctccgccgaacttcatgaccagcatgaagggcacgagctgcttcccaaaggcccccatccaagtataggtctctacatcgtaggtgacaaagagacgctcggtgcgaggatgcgagccgatcgggaagaactggatctcccgccaccaattggaggagtggctattgatgtggtgaaagtagaagtccctgcgacgggccgaacactcgtgctggcttttgtaaaaacgtgcgcagtactggcagcggtgcacgggctgtacatcctgcacgaggttgacctgacgaccgcgcacaaggaagcagagtgggaatttgagcccctcgcctggcgggtttggctggtggtcttctacttcggctgcttgtccttgaccgtctggctgctcgaggggagttacggtggatcggaccaccacgccgcgcgagcccaaagtccagatgtccgcgcgcggcggtcggagcttgatgacaacatcgcgcagatgggagctgtccatggtctggagctcccgcggcgtcaggtcaggcgggagctcctgcaggtttacctcgcatagacgggtcagggcgcgggctagatccaggtgatacctaatttccaggggctggttggtggcggcgtcgatggcttgcaagaggccgcatccccgcggcgcgactacggtaccgcgcggcgggcggtgggccgcgggggtgtccttggatgatgcatctaaaagcggtgacgcgggcgagcccccggaggtagggggggctccggacccgccgggagagggggcaggggcacgtcggcgccgcgcgcgggcaggagctggtgctgcgcgcgtaggttgctggcgaacgcgacgacgcggcggttgatctcctgaatctggcgcctctgcgtgaagacgacgggcccggtgagcttgaacctgaaagagagttcgacagaatcaatttcggtgtcgttgacggcggcctggcgcaaaatctcctgcacgtctcctgagttgtcttgataggcgatctcggccatgaactgctcgatctcttcctcctggagatctccgcgtccggctcgctccacggtggcggcgaggtcgttggaaatgcgggccatgagctgcgagaaggcgttgaggcctccctcgttccagacgcggctgtagaccacgcccccttcggcatcgcgggcgcgcatgaccacctgcgcgagattgagctccacgtgccgggcgaagacggcgtagtttcgcaggcgctgaaagaggtagttgagggtggtggcggtgtgttctgccacgaagaagtacataacccagcgtcgcaacgtggattcgttgatatcccccaaggcctcaaggcgctccatggcctcgtagaagtccacggcgaagttgaaaaactgggagttgcgcgccgacacggttaactcctcctccagaagacggatgagctcggcgacagtgtcgcgcacctcgcgctcaaaggctacaggggcctcttcttcttcttcaatctcctcttccataagggcctccccttcttcttcttctggcggcggtgggggaggggggacacggcggcgacgacggcgcaccgggaggcggtcgacaaagcgctcgatcatctccccgcggcgacggcgcatggtctcggtgacggcgcggccgttctcgcgggggcgcagttggaagacgccgcccgtcatgtcccggttatgggttggcggggggctgccatgcggcagggatacggcgctaacgatgcatctcaacaattgttgtgtaggtactccgccgccgagggacctgagcgagtccgcatcgaccggatcggaaaacctctcgagaaaggcgtctaaccagtcacagtcgcaaggtaggctgagcaccgtggcgggcggcagcgggcggcggtcggggttgtttctggcggaggtgctgctgatgatgtaattaaagtaggcggtcttgagacggcggatggtcgacagaagcaccatgtccttgggtccggcctgctgaatgcgcaggcggtcggccatgccccaggcttcgttttgacatcggcgcaggtctttgtagtagtcttgcatgagcctttctaccggcacttcttcttctccttcctcttgtcctgcatctcttgcatctatcgctgcggcggcggcggagtttggccgtaggtggcgccctcttcctcccatgcgtgtgaccccgaagcccctcatcggctgaagcagggctaggtcggcgacaacgcgctcggctaatatggcctgctgcacctgcgtgagggtagactggaagtcatccatgtccacaaagcggtggtatgcgcccgtgttgatggtgtaagtgcagttggccataacggaccagttaacggtctggtgacccggctgcgagagctcggtgtacctgagacgcgagtaagccctcgagtcaaatacgtagtcgttgcaagtccgcaccaggtactggtatcccaccaaaaagtgcggcggcggctggcggtagaggggccagcgtagggtggccggggctccgggggcgagatcttccaacataaggcgatgatatccgtagatgtacctggacatccaggtgatgccggcggcggtggtggaggcgcgcggaaagtcgcggacgcggttccagatgttgcgcagcggcaaaaagtgctccatggtcgggacgctctggccggtcaggcgcgcgcaatcgttgacgctctagcgtgcaaaaggagagcctgtaagcgggcactcttccgtggtctggtggataaattcgcaagggtatcatggcggacgaccggggttcgagccccgtatccggccgtccgccgtgatccatgcggttaccgcccgcgtgtcgaacccaggtgtgcgacgtcagacaacgggggagtgctccttttggcttccttccaggcgcggcggctgctgcgctagcttttttggccactggccgcgcgcagcgtaagcggttaggctggaaagcgaaagcattaagtggctcgctccctgtagccggagggttattttccaagggttgagtcgcgggacccccggttcgagtctcggaccggccggactgcggcgaacgggggtttgcctccccgtcatgcaagaccccgcttgcaaattcctccggaaacagggacgagccccttttttgcttttcccagatgcatccggtgctgcggcagatgcgcccccctcctcagcagcggcaagagcaagagcagcggcagacatgcagggcaccctcccctcctcctaccgcgtcaggaggggcgacatccgcggttgacgcggcagcagatggtgattacgaacccccgcggcgccgggcccggcactacctggacttggaggagggcgagggcctggcgcggctaggagcgccctctcctgagcggcacccaagggtgcagctgaagcgtgatacgcgtgaggcgtacgtgccgcggcagaacctgtttcgcgaccgcgagggagaggagcccgaggagatgcgggatcgaaagttccacgcagggcgcgagctgcggcatggcctgaatcgcgagcggttgctgcgcgaggaggactttgagcccgacgcgcgaaccgggattagtcccgcgcgcgcacacgtggcggccgccgacctggtaaccgcatacgagcagacggtgaaccaggagattaactttcaaaaaagctttaacaaccacgtgcgtacgcttgtggcgcgcgaggaggtggctataggactgatgcatctgtgggactttgtaagcgcgctggagcaaaacccaaatagcaagccgctcatggcgcagctgttccttatagtgcagcacagcagggacaacgaggcattcagggatgcgctgctaaacatagtagagcccgagggccgctggctgctcgatttgataaacatcctgcagagcatagtggtgcaggagcgcagcttgagcctggctgacaaggtggccgccatcaactattccatgcttagcctgggcaagttttacgcccgcaagatataccataccccttacgttcccatagacaaggaggtaaagatcgaggggttctacatgcgcatggcgctgaaggtgcttaccttgagcgacgacctgggcgtttatcgcaacgagcgcatccacaaggccgtgagcgtgagccggcggcgcgagctcagcgaccgcgagctgatgcacagcctgcaaagggccctggctggcacgggcagcggcgatagagaggccgagtcctactttgacgcgggcgctgacctgcgctgggccccaagccgacgcgccctggaggcagctggggccggacctgggctggcggtggcacccgcgcgcgctggcaacgtcggcggcgtggaggaatatgacgaggacgatgagtacgagccagaggacggcgagtactaagcggtgatgtttctgatcagatgatgcaagacgcaacggacccggcggtgcgggcggcgctgcagagccagccgtccggccttaactccacggacgactggcgccaggtcatggaccgcatcatgtcgctgactgcgcgcaatcctgacgcgttccggcagcagccgcaggccaaccggctctccgcaattctggaagcggtggtcccggcgcgcgcaaaccccacgcacgagaaggtgctggcgatcgtaaacgcgctggccgaaaacagggccatccggcccgacgaggccggcctggtctacgacgcgctgcttcagcgcgtggctcgttacaacagcggcaacgtgcagaccaacctggaccggctggtgggggatgtgcgcgaggccgtggcgcagcgtgagcgcgcgcagcagcagggcaacctgggctccatggttgcactaaacgccttcctgagtacacagcccgccaacgtgccgcggggacaggaggactacaccaactttgtgagcgcactgcggctaatggtgactgagacaccgcaaagtgaggtgtaccagtctgggccagactattttttccagaccagtagacaaggcctgcagaccgtaaacctgagccaggctttcaaaaacttgcaggggctgtggggggtgcgggctcccacaggcgaccgcgcgaccgtgtctagcttgctgacgcccaactcgcgcctgttgctgctgctaatagcgcccttcacggacagtggcagcgtgtcccgggacacatacctaggtcacttgctgacactgtaccgcgaggccataggtcaggcgcatgtggacgagcatactttccaggagattacaagtgtcagccgcgcgctggggcaggaggacacgggcagcctggaggcaaccctaaactacctgctgaccaaccggcggcagaagatcccctcgttgcacagtttaaacagcgaggaggagcgcattttgcgctacgtgcagcagagcgtgagccttaacctgatgcgcgacggggtaacgcccagcgtggcgctggacatgaccgcgcgcaacatggaaccgggcatgtatgcctcaaaccggccgtttatcaaccgcctaatggactacttgcatcgcgcggccgccgtgaaccccgagtatttcaccaatgccatcttgaacccgcactggctaccgccccctggtttctacaccgggggattcgaggtgcccgagggtaacgatggattcctctgggacgacatagacgacagcgtgttttccccgcaaccgcagaccctgctagagttgcaacagcgcgagcaggcagaggcggcgctgcgaaaggaaagcttccgcaggccaagcagcttgtccgatctaggcgctgcggccccgcggtcagatgctagtagcccatttccaagcttgatagggtctcttaccagcactcgcaccacccgcccgcgcctgctgggcgaggaggagtacctaaacaactcgctgctgcagccgcagcgcgaaaaaaacctgcctccggcatttcccaacaacgggatagagagcctagtggacaagatgagtagatggaagacgtacgcgcaggagcacagggacgtgccaggcccgcgcccgcccacccgtcgtcaaaggcacgaccgtcagcggggtctggtgtgggaggacgatgactcggcagacgacagcagcgtcctggatttgggagggagtggcaacccgtttgcgcaccttcgccccaggctggggagaatgttttaaaaaaaaaaaagcatgatgcaaaataaaaaactcaccaaggccatggcaccgagcgttggttttcttgtattccccttagtatgcggcgcgcggcgatgtatgaggaaggtcctcctccctcctacgagagtgtggtgagcgcggcgccagtggcggcggcgctgggttctcccttcgatgctcccctggacccgccgtttgtgcctccgcggtacctgcggcctaccggggggagaaacagcatccgttactctgagttggcacccctattcgacaccacccgtgtgtacctggtggacaacaagtcaacggatgtggcatccctgaactaccagaacgaccacagcaactttctgaccacggtcattcaaaacaatgactacagcccgggggaggcaagcacacagaccatcaatcttgacgaccggtcgcactggggcggcgacctgaaaaccatcctgcataccaacatgccaaatgtgaacgagttcatgtttaccaataagtttaaggcgcgggtgatggtgtcgcgcttgcctactaaggacaatcaggtggagctgaaatacgagtgggtggagttcacgctgcccgagggcaactactccgagaccatgaccatagaccttatgaacaacgcgatcgtggagcactacttgaaagtgggcagacagaacggggttctggaaagcgacatcggggtaaagtttgacacccgcaacttcagactggggtttgaccccgtcactggtcttgtcatgcctggggtatatacaaacgaagccttccatccagacatcattttgctgccaggatgcggggtggacttcacccacagccgcctgagcaacttgttgggcatccgcaagcggcaacccttccaggagggctttaggatcacctacgatgatctggagggtggtaacattcccgcactgttggatgtggacgcctaccaggcgagcttgaaagatgacaccgaacagggcgggggtggcgcaggcggcagcaacagcagtggcagcggcgcggaagagaactccaacgcggcagccgcggcaatgcagccggtggaggacatgaacgatcatgccattcgcggcgacacctttgccacacgggctgaggagaagcgcgctgaggccgaagcagcggccgaagctgccgcccccgctgcgcaacccgaggtcgagaagcctcagaagaaaccggtgatcaaacccctgacagaggacagcaagaaacgcagttacaacctaataagcaatgacagcaccttcacccagtaccgcagctggtaccttgcatacaactacggcgaccctcagaccggaatccgctcatggaccctgctttgcactcctgacgtaacctgcggctcggagcaggtctactggtcgttgccagacatgatgcaagaccccgtgaccttccgctccacgcgccagatcagcaactttccggtggtgggcgccgagctgttgcccgtgcactccaagagcttctacaacgaccaggccgtctactcccaactcatccgccagtttacctctctgacccacgtgttcaatcgctttcccgagaaccagattttggcgcgcccgccagcccccaccatcaccaccgtcagtgaaaacgttcctgctctcacagatcacgggacgctaccgctgcgcaacagcatcggaggagtccagcgagtgaccattactgacgccagacgccgcacctgcccctacgtttacaaggccctgggcatagtctcgccgcgcgtcctatcgagccgcactttttgagcaagcatgtccatccttatatcgcccagcaataacacaggctggggcctgcgcttcccaagcaagatgtttggcggggccaagaagcgctccgaccaacacccagtgcgcgtgcgcgggcactaccgcgcgccctggggcgcgcacaaacgcggccgcactgggcgcaccaccgtcgatgacgccatcgacgcggtggtggaggaggcgcgcaactacacgcccacgccgccaccagtgtccacagtggacgcggccattcagaccgtggtgcgcggagcccggcgctatgctaaaatgaagagacggcggaggcgcgtagcacgtcgccaccgccgccgacccggcactgccgcccaacgcgcggcggcggccctgcttaaccgcgcacgtcgcaccggccgacgggcggccatgcgggccgctcgaaggctggccgcgggtattgtcactgtgccccccaggtccaggcgacgagcggccgccgcagcagccgcggccattagtgctatgactcagggtcgcaggggcaacgtgtattgggtgcgcgactcggttagcggcctgcgcgtgcccgtgcgcacccgccccccgcgcaactagattgcaagaaaaaactacttagactcgtactgttgtatgtatccagcggcggcggcgcgcaacgaagctatgtccaagcgcaaaatcaaagaagagatgctccaggtcatcgcgccggagatctatggccccccgaagaaggaagagcaggattacaagccccgaaagctaaagcgggtcaaaaagaaaaagaaagatgatgatgatgaacttgacgacgaggtggaactgctgcacgctaccgcgcccaggcgacgggtacagtggaaaggtcgacgcgtaaaacgtgttttgcgacccggcaccaccgtagtctttacgcccggtgagcgctccacccgcacctacaagcgcgtgtatgatgaggtgtacggcgacgaggacctgcttgagcaggccaacgagcgcctcggggagtttgcctacggaaagcggcataaggacatgctggcgttgccgctggacgagggcaacccaacacctagcctaaagcccgtaacactgcagcaggtgctgcccgcgcttgcaccgtccgaagaaaagcgcggcctaaagcgcgagtctggtgacttggcacccaccgtgcagctgatggtacccaagcgccagcgactggaagatgtcttggaaaaaatgaccgtggaacctgggctggagcccgaggtccgcgtgcggccaatcaagcaggtggcgccgggactgggcgtgcagaccgtggacgttcagatacccactaccagtagcaccagtattgccaccgccacagagggcatggagacacaaacgtccccggttgcctcagcggtggcggatgccgcggtgcaggcggtcgctgcggccgcgtccaagacctctacggaggtgcaaacggacccgtggatgtttcgcgtttcagccccccggcgcccgcgccgttcgaggaagtacggcgccgccagcgcgctactgcccgaatatgccctacatccttccattgcgcctacccccggctatcgtggctacacctaccgccccagaagacgagcaactacccgacgccgaaccaccactggaacccgccgccgccgtcgccgtcgccagcccgtgctggccccgatttccgtgcgcagggtggctcgcgaaggaggcaggaccctggtgctgccaacagcgcgctaccaccccagcatcgtttaaaagccggtctttgtggttcttgcagatatggccctcacctgccgcctccgtttcccggtgccgggattccgaggaagaatgcaccgtaggaggggcatggccggccacggcctgacgggcggcatgcgtcgtgcgcaccaccggcggcggcgcgcgtcgcaccgtcgcatgcgcggcggtatcctgcccctccttattccactgatcgccgcggcgattggcgccgtgcccggaattgcatccgtggccttgcaggcgcagagacactgattaaaaacaagttgcatgtggaaaaatcaaaataaaaagtctggactctcacgctcgcttggtcctgtaactattttgtagaatggaagacatcaactttgcgtctctggccccgcgacacggctcgcgcccgttcatgggaaactggcaagatatcggcaccagcaatatgagcggtggcgccttcagctggggctcgctgtggagcggcattaaaaatttcggttccaccgttaagaactatggcagcaaggcctggaacagcagcacaggccagatgctgagggataagttgaaagagcaaaatttccaacaaaaggtggtagatggcctggcctctggcattagcggggtggtggacctggccaaccaggcagtgcaaaataagattaacagtaagcttgatccccgccctcccgtagaggagcctccaccggccgtggagacagtgtctccagaggggcgtggcgaaaagcgtccgcgccccgacagggaagaaactctggtgacgcaaatagacgagcctccctcgtacgaggaggcactaaagcaaggcctgcccaccacccgtcccatcgcgcccatggctaccggagtgctgggccagcacacacccgtaacgctggacctgcctccccccgccgacacccagcagaaacctgtgctgccaggcccgaccgccgttgttgtaacccgtcctagccgcgcgtccctgcgccgcgccgccagcggtccgcgatcgttgcggcccgtagccagtggcaactggcaaagcacactgaacagcatcgtgggtctgggggtgcaatccctgaagcgccgacgatgcttctgatagctaacgtgtcgtatgtgtgtcatgtatgcgtccatgtcgccgccagaggagctgctgagccgccgcgcgcccgctttccaagatggctaccccttcgatgatgccgcagtggtcttacatgcacatctcgggccaggacgcctcggagtacctgagccccgggctggtgcagtttgcccgcgccaccgagacgtacttcagcctgaataacaagtttagaaaccccacggtggcgcctacgcacgacgtgaccacagaccggtcccagcgtttgacgctgcggttcatccctgtggaccgtgaggatactgcgtactcgtacaaggcgcggttcaccctagctgtgggtgataaccgtgtgctggacatggcttccacgtactttgacatccgcggcgtgctggacaggggccctacttttaagccctactctggcactgcctacaacgccctggctcccaagggtgccccaaatccttgcgaatgggatgaagctgctactgctcttgaaataaacctagaagaagaggacgatgacaacgaagacgaagtagacgagcaagctgagcagcaaaaaactcacgtatttgggcaggcgccttattctggtataaatattacaaaggagggtattcaaataggtgtcgaaggtcaaacacctaaatatgccgataaaacatttcaacctgaacctcaaataggagaatctcagtggtacgaaacagaaattaatcatgcagctgggagagtcctaaaaaagactaccccaatgaaaccatgttacggttcatatgcaaaacccacaaatgaaaatggagggcaaggcattcttgtaaagcaacaaaatggaaagctagaaagtcaagtggaaatgcaatttttctcaactactgaggcagccgcaggcaatggtgataacttgactcctaaagtggtattgtacagtgaagatgtagatatagaaaccccagacactcatatttcttacatgcccactattaaggaaggtaactcacgagaactaatgggccaacaatctatgcccaacaggcctaattacattgcttttagggacaattttattggtctaatgtattacaacagcacgggtaatatgggtgttctggcgggccaagcatcgcagttgaatgctgttgtagatttgcaagacagaaacacagagctttcataccagcttttgcttgattccattggtgatagaaccaggtacttttctatgtggaatcaggctgttgacagctatgatccagatgttagaattattgaaaatcatggaactgaagatgaacttccaaattactgctttccactgggaggtgtgattaatacagagactcttaccaaggtaaaacctaaaacaggtcaggaaaatggatgggaaaaagatgctacagaattttcagataaaaatgaaataagagttggaaataattttgccatggaaatcaatctaaatgccaacctgtggagaaatttcctgtactccaacatagcgctgtatttgcccgacaagctaaagtacagtccttccaacgtaaaaatttctgataacccaaacacctacgactacatgaacaagcgagtggtggctcccgggctagtggactgctacattaaccttggagcacgctggtcccttgactatatggacaacgtcaacccatttaaccaccaccgcaatgctggcctgcgctaccgctcaatgttgctgggcaatggtcgctatgtgcccttccacatccaggtgcctcagaagttctttgccattaaaaacctccttctcctgccgggctcatacacctacgagtggaacttcaggaaggatgttaacatggttctgcagagctccctaggaaatgacctaagggttgacggagccagcattaagtttgatagcatttgcctttacgccaccttcttccccatggcccacaacaccgcctccacgcttgaggccatgcttagaaacgacaccaacgaccagtcctttaacgactatctctccgccgccaacatgctctaccctatacccgccaacgctaccaacgtgcccatatccatcccctcccgcaactgggcggctttccgcggctgggccttcacgcgccttaagactaaggaaaccccatcactgggctcgggctacgacccttattacacctactctggctctataccctacctagatggaaccttttacctcaaccacacctttaagaaggtggccattacctttgactcttctgtcagctggcctggcaatgaccgcctgcttacccccaacgagtttgaaattaagcgctcagttgacggggagggttacaacgttgcccagtgtaacatgaccaaagactggttcctggtacaaatgctagctaactataacattggctaccagggcttctatatcccagagagctacaaggaccgcatgtactccttctttagaaacttccagcccatgagccgtcaggtggtggatgatactaaatacaaggactaccaacaggtgggcatcctacaccaacacaacaactctggatttgttggctaccttgcccccaccatgcgcgaaggacaggcctaccctgctaacttcccctatccgcttataggcaagaccgcagttgacagcattacccagaaaaagtttctttgcgatcgcaccctttggcgcatcccattctccagtaactttatgtccatgggcgcactcacagacctgggccaaaaccttctctacgccaactccgcccacgcgctagacatgacttttgaggtggatcccatggacgagcccacccttctttatgttttgtttgaagtctttgacgtggtccgtgtgcaccagccgcaccgcggcgtcatcgaaaccgtgtacctgcgcacgcccttctcggccggcaacgccacaacataaagaagcaagcaacatcaacaacagctgccgccatgggctccagtgagcaggaactgaaagccattgtcaaagatcttggttgtgggccatattttttgggcacctatgacaagcgctttccaggctttgtttctccacacaagctcgcctgcgccatagtcaatacggccggtcgcgagactgggggcgtacactggatggcctttgcctggaacccgcactcaaaaacatgctacctctttgagccctttggcttttctgaccagcgactcaagcaggtttaccagtttgagtacgagtcactcctgcgccgtagcgccattgcttcttcccccgaccgctgtataacgctggaaaagtccacccaaagcgtacaggggcccaactcggccgcctgtggactattctgctgcatgtttctccacgcctttgccaactggccccaaactcccatggatcacaaccccaccatgaaccttattaccggggtacccaactccatgctcaacagtccccaggtacagcccaccctgcgtcgcaaccaggaacagctctacagcttcctggagcgccactcgccctacttccgcagccacagtgcgcagattaggagcgccacttctttttgtcacttgaaaaacatgtaaaaataatgtactagagacactttcaataaaggcaaatgcttttatttgtacactctcgggtgattatttacccccacccttgccgtctgcgccgtttaaaaatcaaaggggttctgccgcgcatcgctatgcgccactggcagggacacgttgcgatactggtgtttagtgctccacttaaactcaggcacaaccatccgcggcagctcggtgaagttttcactccacaggctgcgcaccatcaccaacgcgtttagcaggtcgggcgccgatatcttgaagtcgcagttggggcctccgccctgcgcgcgcgagttgcgatacacagggttgcagcactggaacactatcagcgccgggtggtgcacgctggccagcacgctcttgtcggagatcagatccgcgtccaggtcctccgcgttgctcagggcgaacggagtcaactttggtagctgccttcccaaaaagggcgcgtgcccaggctttgagttgcactcgcaccgtagtggcatcaaaaggtgaccgtgcccggtctgggcgttaggatacagcgcctgcataaaagccttgatctgcttaaaagccacctgagcctttgcgccttcagagaagaacatgccgcaagacttgccggaaaactgattggccggacaggccgcgtcgtgcacgcagcaccttgcgtcggtgttggagatctgcaccacatttcggccccaccggttcttcacgatcttggccttgctagactgctccttcagcgcgcgctgcccgttttcgctcgtcacatccatttcaatcacgtgctccttatttatcataatgcttccgtgtagacacttaagctcgccttcgatctcagcgcagcggtgcagccacaacgcgcagcccgtgggctcgtgatgcttgtaggtcacctctgcaaacgactgcaggtacgcctgcaggaatcgccccatcatcgtcacaaaggtcttgttgctggtgaaggtcagctgcaacccgcggtgctcctcgttcagccaggtcttgcatacggccgccagagcttccacttggtcaggcagtagtttgaagttcgcctttagatcgttatccacgtggtacttgtccatcagcgcgcgcgcagcctccatgcccttctcccacgcagacacgatcggcacactcagcgggttcatcaccgtaatttcactttccgcttcgctgggctcttcctcttcctcttgcgtccgcataccacgcgccactgggtcgtcttcattcagccgccgcactgtgcgcttacctcctttgccatgcttgattagcaccggtgggttgctgaaacccaccatttgtagcgccacatcttctctttcttcctcgctgtccacgattacctctggtgatggcgggcgctcgggcttgggagaagggcgcttctttttcttcttgggcgcaatggccaaatccgccgccgaggtcgatggccgcgggctgggtgtgcgcggcaccagcgcgtcttgtgatgagtcttcctcgtcctcggactcgatacgccgcctcatccgcttttttgggggcgcccggggaggcggcggcgacggggacggggacgacacgtcctccatggttgggggacgtcgcgccgcaccgcgtccgcgctcgggggtggtttcgcgctgctcctcttcccgactggccatttccttctcctataggcagaaaaagatcatggagtcagtcgagaagaaggacagcctaaccgccccctctgagttcgccaccaccgcctccaccgatgccgccaacgcgcctaccaccttccccgtcgaggcacccccgcttgaggaggaggaagtgattatcgagcaggacccaggttttgtaagcgaagacgacgaggaccgctcagtaccaacagaggataaaaagcaagaccaggacaacgcagaggcaaacgaggaacaagtcgggcggggggacgaaaggcatggcgactacctagatgtgggagacgacgtgctgttgaagcatctgcagcgccagtgcgccattatctgcgacgcgttgcaagagcgcagcgatgtgcccctcgccatagcggatgtcagccttgcctacgaacgccacctattctcaccgcgcgtaccccccaaacgccaagaaaacggcacatgcgagcccaacccgcgcctcaacttctaccccgtatttgccgtgccagaggtgcttgccacctatcacatctttttccaaaactgcaagatacccctatcctgccgtgccaaccgcagccgagcggacaagcagctggccttgcggcagggcgctgtcatacctgatatcgcctcgctcaacgaagtgccaaaaatctttgagggtcttggacgcgacgagaagcgcgcggcaaacgctctgcaacaggaaaacagcgaaaatgaaagtcactctggagtgttggtggaactcgagggtgacaacgcgcgcctagccgtactaaaacgcagcatcgaggtcacccactttgcctacccggcacttaacctaccccccaaggtcatgagcacagtcatgagtgagctgatcgtgcgccgtgcgcagcccctggagagggatgcaaatttgcaagaacaaacagaggagggcctacccgcagttggcgacgagcagctagcgcgctggcttcaaacgcgcgagcctgccgacttggaggagcgacgcaaactaatgatggccgcagtgctcgttaccgtggagcttgagtgcatgcagcggttctttgctgacccggagatgcagcgcaagctagaggaaacattgcactacacctttcgacagggctacgtacgccaggcctgcaagatctccaacgtggagctctgcaacctggtctcctaccttggaattttgcacgaaaaccgccttgggcaaaacgtgcttcattccacgctcaagggcgaggcgcgccgcgactacgtccgcgactgcgtttacttatttctatgctacacctggcagacggccatgggcgtttggcagcagtgcttggaggagtgcaacctcaaggagctgcagaaactgctaaagcaaaacttgaaggacctatggacggccttcaacgagcgctccgtggccgcgcacctggcggacatcattttccccgaacgcctgcttaaaaccctgcaacagggtctgccagacttcaccagtcaaagcatgttgcagaactttaggaactttatcctagagcgctcaggaatcttgcccgccacctgctgtgcacttcctagcgactttgtgcccattaagtaccgcgaatgccctccgccgctttggggccactgctaccttctgcagctagccaactaccttgcctaccactctgacataatggaagacgtgagcggtgacggtctactggagtgtcactgtcgctgcaacctatgcaccccgcaccgctccctggtttgcaattcgcagctgcttaacgaaagtcaaattatcggtacctttgagctgcagggtccctcgcctgacgaaaagtccgcggctccggggttgaaactcactccggggctgtggacgtcggcttaccttcgcaaatttgtacctgaggactaccacgcccacgagattaggttctacgaagaccaatcccgcccgcctaatgcggagcttaccgcctgcgtcattacccagggccacattcttggccaattgcaagccatcaacaaagcccgccaagagtttctgctacgaaagggacggggggtttacttggacccccagtccggcgaggagctcaacccaatccccccgccgccgcagccctatcagcagcagccgcgggcccttgcttcccaggatggcacccaaaaagaagctgcagctgccgccgccacccacggacgaggaggaatactgggacagtcaggcagaggaggttttggacgaggaggaggaggacatgatggaagactgggagagcctagacgaggaagcttccgaggtcgaagaggtgtcagacgaaacaccgtcaccctcggtcgcattcccctcgccggcgccccagaaatcggcaaccggttccagcatggctacaacctccgctcctcaggcgccgccggcactgcccgttcgccgacccaaccgtagatgggacaccactggaaccagggccggtaagtccaagcagccgccgccgttagcccaagagcaacaacagcgccaaggctaccgctcatggcgcgggcacaagaacgccatagttgcttgcttgcaagactgtgggggcaacatctccttcgcccgccgctttcttctctaccatcacggcgtggccttcccccgtaacatcctgcattactaccgtcatctctacagcccatactgcaccggcggcagcggcagcaacagcagcggccacacagaagcaaaggcgaccggatagcaagactctgacaaagcccaagaaatccacagcggcggcagcagcaggaggaggagcgctgcgtctggcgcccaacgaacccgtatcgacccgcgagcttagaaacaggatttttcccactctgtatgctatatttcaacagagcaggggccaagaacaagagctgaaaataaaaaacaggtctctgcgatccctcacccgcagctgcctgtatcacaaaagcgaagatcagcttcggcgcacgctggaagacgcggaggctctcttcagtaaatactgcgcgctgactcttaaggactagtttcgcgccctttctcaaatttaagcgcgaaaactacgtcatctccagcggccacacccggcgccagcacctgttgtcagcgccattatgagcaaggaaattcccacgccctacatgtggagttaccagccacaaatgggacttgcggctggagctgcccaagactactcaacccgaataaactacatgagcgcgggaccccacatgatatcccgggtcaacggaatacgcgcccaccgaaaccgaattctcctggaacaggcggctattaccaccacacctcgtaataaccttaatccccgtagttggcccgctgccctggtgtaccaggaaagtcccgctcccaccactgtggtacttcccagagacgcccaggccgaagttcagatgactaactcaggggcgcagcttgcgggcggctttcgtcacagggtgcggtcgcccgggcagggtataactcacctgacaatcagagggcgaggtattcagctcaacgacgagtcggtgagctcctcgcttggtctccgtccggacgggacatttcagatcggcggcgccggccgctcttcattcacgcctcgtcaggcaatcctaactctgcagacctcgtcctctgagccgcgctctggaggcattggaactctgcaatttattgaggagtttgtgccatcggtctactttaaccccttctcgggacctcccggccactatccggatcaatttattcctaactttgacgcggtaaaggactcggcggacggctacgactgaatgttaagtggagaggcagagcaactgcgcctgaaacacctggtccactgtcgccgccacaagtgctttgcccgcgactccggtgagttttgctactttgaattgcccgaggatcatatcgagggcccggcgcacggcgtccggcttaccgcccagggagagcttgcccgtagcctgattcgggagtttacccagcgccccctgctagttgagcgggacaggggaccctgtgttctcactgtgatttgcaactgtcctaaccctggattacatcaagatcctctagttaatgtcaggtcgcctaagtcgattaactagagtacccggggatcttattccctttaactaataaaaaaaaataataaagcatcacttacttaaaatcagttagcaaatttctgtccagtttattcagcagcacctccttgccctcctcccagctctggtattgcagcttcctcctggctgcaaactttctccacaatctaaatggaatgtcagtttcctcctgttcctgtccatccgcacccactatcttcatgttgttgcagatgaagcgcgcaagaccgtctgaagataccttcaaccccgtgtatccatatgacacggaaaccggtcctccaactgtgccttttcttactcctccctttgtatcccccaatgggtttcaagagagtccccctggggtactctctttgcgcctatccgaacctctagttacctccaatggcatgcttgcgctcaaaatgggcaacggcctctctctggacgaggccggcaaccttacctcccaaaatgtaaccactgtgagcccacctctcaaaaaaaccaagtcaaacataaacctggaaatatctgcacccctcacagttacctcagaagccctaactgtggctgccgccgcacctctaatggtcgcgggcaacacactcaccatgcaatcacaggccccgctaaccgtgcacgactccaaacttagcattgccacccaaggacccctcacagtgtcagaaggaaagctagccctgcaaacatcaggccccctcaccaccaccgatagcagtacccttactatcactgcctcaccccctctaactactgccactggtagcttgggcattgacttgaaagagcccatttatacacaaaatggaaaactaggactaaagtacggggctcctttgcatgtaacagacgacctaaacactttgaccgtagcaactggtccaggtgtgactattaataatacttccttgcaaactaaagttactggagccttgggttttgattcacaaggcaatatgcaacttaatgtagcaggaggactaaggattgattctcaaaacagacgccttatacttgatgttagttatccgtttgatgctcaaaaccaactaaatctaagactaggacagggccctctttttataaactcagcccacaacttggatattaactacaacaaaggcctttacttgtttacagcttcaaacaattccaaaaagcttgaggttaacctaagcactgccaaggggttgatgtttgacgctacagccatagccattaatgcaggagatgggcttgaatttggttcacctaatgcaccaaacacaaatcccctcaaaacaaaaattggccatggcctagaatttgattcaaacaaggctatggttcctaaactaggaactggccttagttttgacagcacaggtgccattacagtaggaaacaaaaataatgataagctaactttgtggaccggaataaaccctccacctaactgtcaaattgtggaaaacactaatacaaatgatggcaaacttactttagtattagtaaaaaatggagggcttgttaatggctacgtgtctctagttggtgtatcagacactgtgaaccaaatgttcacacaaaagacagcaaacatccaattaagattatattttgactcttctggaaatctattaactgaggaatcagacttaaaaattccacttaaaaataaatcttctacagcgaccagtgaaactgtagccagcagcaaagcctttatgccaagtactacagcttatcccttcaacaccactactagggatagtgaaaactacattcatggaatatgttactacatgactagttatgatagaagtctatttcccttgaacatttctataatgctaaacagccgtatgatttcttccaatgttgcctatgccatacaatttgaatggaatctaaatgcaagtgaatctccagaaagcaacatagctacgctgaccacatccccctttttcttttcttacattacagaagacgacaactaaagaatcgtttgtgttatgtttcaacgtgtttatttttcaattgcagaaaatttcaagtcatttttcattcagtagtatagccccaccaccacatagcttatacagatcaccgtaccttaatcaaactcacagaaccctagtattcaacctgccacctccctcccaacacacagagtacacagtcctttctccccggctggccttaaaaagcatcatatcatgggtaacagacatattcttaggtgttatattccacacggtttcctgtcgagccaaacgctcatcagtgatattaataaactccccgggcagctcacttaagttcatgtcgctgtccagctgctgagccacaggctgctgtccaacttgcggttgcttaacgggcggcgaaggagaagtccacgctcactgattaaacatggcgccatccaccaccatcctaaaccagctggccaaaacctgcccgccggctatacactgcagggaaccgggactggaacaatgacagtggagagcccaggactcgtaaccatggatcatcatgctcgtcatgatatcaatgttggcacaacacaggcacacgtgcatacacttcctcaggattacaagctcctcccgcgttagaaccatatcccagggaacaacccattcctgaatcagcgtaaatcccacactgcagggaagacctcgcacgtaactcacgttgtgcattgtcaaagtgttacattcgggcagcagcggatgatcctccagtatggtagcgcgggtttctgtctcaaaaggaggtagacgatccctactgtacggagtgcgccgagacaaccgagatcgtgttggtcgtagtgtcatgccaaatggaacgccggacgtagtcatatttcctgaagcaaaaccaggtgcgggcgtgacaaacagatctgcgtctccggtctcgccgcttagatcgctctgtgtagtagttgtagtatatccactctctcaaagcatccaggcgccccctggcttcgggttctatgtaaactccttcatgcgccgctgccctgataacatccaccaccgcagaataagccacacccagccaacctacacattcgttctgcgagtcacacacgggaggagcgggaagagctggaagaaccatgtttttttttttattccaaaagattatccaaaacctcaaaatgaagatctattaagtgaacgcgctcccctccggtggcgtggtcaaactctacagccaaagaacagataatggcatttgtaagatgttgcacaatggcttccaaaaggcaaacggccctcacgtccaagtggacgtaaaggctaaacccttcagggtgaatctcctctataaacattccagcaccttcaaccatgcccaaataattctcatctcgccaccttctcaatatatctctaagcaaatcccgaatattaagtccggccattgtaaaaatctgctccagagcgccctccaccttcagcctcaagcagcgaatcatgattgcaaaaattcaggttcctcacagacctgtataagattcaaaagcggaacattaacaaaaataccgcgatcccgtaggtcccttcgcagggccagctgaacataatcgtgcaggtctgcacggaccagcgcggccacttccccgccaggaaccatgacaaaagaacccacactgattatgacacgcatactcggagctatgctaaccagcgtagccccgatgtaagcttgttgcatgggcggcgatataaaatgcaaggtgctgctcaaaaaatcaggcaaagcctcgcgcaaaaaagaaagcacatcgtagtcatgctcatgcagataaaggcaggtaagctccggaaccaccacagaaaaagacaccatttttctctcaaacatgtctgcgggtttctgcataaacacaaaataaaataacaaaaaaacatttaaacattagaagcctgtcttacaacaggaaaaacaacccttataagcataagacggactacggccatgccggcgtgaccgtaaaaaaactggtcaccgtgattaaaaagcaccaccgacagctcctcggtcatgtccggagtcataatgtaagactcggtaaacacatcaggttgattcacatcggtcagtgctaaaaagcgaccgaaatagcccgggggaatacatacccgcaggcgtagagacaacattacagcccccataggaggtataacaaaattaataggagagaaaaacacataaacacctgaaaaaccctcctgcctaggcaaaatagcaccctcccgctccagaacaacatacagcgcttccacagcggcagccataacagtcagccttaccagtaaaaaagaaaacctattaaaaaaacaccactcgacacggcaccagctcaatcagtcacagtgtaaaaaagggccaagtgcagagcgagtatatataggactaaaaaatgacgtaacggttaaagtccacaaaaaacacccagaaaaccgcacgcgaacctacgcccagaaacgaaagccaaaaaacccacaacttcctcaaatcgtcacttccgttttcccacgttacgtcacttcccattttaagaaaactacaattcccaacacatacaagttactccgccctaaaacctacgtcacccgccccgttcccacgccccgcgccacgtcacaaactccaccccctcattatcatattggcttcaatccaaaataaggtatattattgatgatg
